(19) United States
(12) Patent Application Publication
(10) Pub. No.: US 2024/0018515 A1
(43) Pub. Date: Jan. 18, 2024

(54) COMPLEMENT FACTOR B (CFB) IRNA COMPOSITIONS AND METHODS OF USE THEREOF

(71) Applicant: Alnylam Pharmaceuticals, Inc., Cambridge, MA (US)

(72) Inventors: James D. McIninch, Burlington, MA (US); Adam Castoreno, Framingham, MA (US); Mark K. Schlegel, Boston, MA (US); Elane Fishilevich, Rochester, MA (US); Kristina Yucius, Burlington, MA (US); Charalambos Kaittanis, Cambridge, MA (US)

(21) Appl. No.: 17/974,598

(22) Filed: Oct. 27, 2022

Related U.S. Application Data
(63) Continuation of application No. PCT/US2021/029872, filed on Apr. 29, 2021.
(60) Provisional application No. 63/157,899, filed on Mar. 8, 2021.
(60) Provisional application No. 63/119,009, filed on Nov. 30, 2020.
(60) Provisional application No. 63/017,725, filed on Apr. 30, 2020.

(51) Int. Cl. C12N 15/113; A61P 43/00

(52) U.S. Cl. CPC C12N 15/113; C12N 2310/31; C12N 2310/11; A61P 43/00

(57) ABSTRACT

The present invention relates to RNAi agents, e.g., dsRNA agents, targeting the complement factor B (CFB) gene. The invention also relates to methods of using such RNAi agents to inhibit expression of a CFB gene and to methods of treating or preventing a CFB-associated disease in a subject.

### RELATED APPLICATIONS

[0001] This application is a 35 § U.S.C. 111(a) continuation application which claims the benefit of priority to PCT/US2021/029872, filed on Apr. 29, 2021, which, in turn, claims the benefit of priority to U.S. Provisional Application No. 63/017,725, filed on Apr. 30, 2020, U.S. Provisional Application No. 63/119,009, filed on Nov. 30, 2020, and U.S. Provisional Application No. 63/157,899, filed on Mar. 8, 2021. The entire contents of each of the foregoing applications are incorporated herein by reference.

### SEQUENCE LISTING

[0002] The instant application contains a Sequence Listing which has been submitted electronically in XML file format and is hereby incorporated by reference in its entirety. Said XML copy, created on Jun. 1, 2023, is named 121301-11404_SL.xml and is 9,553,806 bytes in size.

### BACKGROUND OF THE INVENTION

[0003] Complement was first discovered in the 1890s when it was found to aid or “complement” the killing of bacteria by heat-stable antibodies present in normal serum (Walport, M. J. (2001) N Engl J Med. 344:1058). The complement system consists of more than 30 proteins that are either present as soluble proteins in the blood or are present as membrane-associated proteins. Activation of complement leads to a sequential cascade of enzymatic reactions, known as complement activation pathways resulting in the formation of the potent anaphylatoxins C3a and C5a that elicit a plethora of physiological responses that range from chemoattraction to apoptosis. Initially, complement was thought to play a major role in innate immunity where a robust and rapid response is mounted against invading pathogens. However, recently it is becoming increasingly evident that complement also plays an important role in adaptive immunity involving T and B cells that help in elimination of pathogens (Dunkelberger J R and Song W C. (2010) Cell Res. 20:34; Molina H, et al. (1996) Proc Natl Acad Sci USA. 93:3357), in maintaining immunologic memory preventing pathogenic re-invasion, and is involved in numerous human pathological states (Qu, H, et al. (2009) Mol Immunol. 47:185; Wagner, E. and Frank M M. (2010) Nat Rev Drug Discov. 9:43).

[0004] Complement activation is known to occur through three different pathways: alternate, classical and lectin (FIG. 1) involving proteins that mostly exist as inactive zymogens that are then sequentially cleaved and activated.

[0005] The classical pathway is often activated by antibody-antigen complexes or by the C-reactive protein (CRP), both of which interact with complement component C1q. In addition, the classical pathway can be activated by phosphatidyl serine present in apoptotic bodies in the absence of immune complexes.

[0006] The lectin pathway is initiated by the mannose-binding lectins (MBL) that bind to complex carbohydrate residues on the surface of pathogens. The activation of the classical pathway or the lectin pathway leads to activation of the (C4b2b) C3 convertase.

[0007] The alternate pathway is activated by the binding of C3b, which is spontaneously generated by the hydrolysis of C3, on targeted surfaces. This surface-bound C3b is then recognized by factor B, forming the complex C3bB. The C3bB complex, in turn, is cleaved by factor D to yield the active form of the C3 convertase of the AP (C3bBb). Both types of C3 convertases will cleave C3, forming C3b. C3b then either binds to more factor B, enhancing the complement activation through the AP (the so-called alternative or amplification loop), or leads to the formation of the active C5 convertase (C3bBbC3b or C4bC2bC3b), which cleaves C5 and triggers the late events that result in the formation of the membrane attack complex (MAC) (C5b-9).

[0008] Inappropriate activation of the complement system is responsible for propagating or initiating pathology in many different diseases, including, for example, C3 glomerulopathy, systemic lupus erythematosus (SLE), e.g., Lupus Nephritis, IgA nephropathy, diabetic nephropathy, polycystic kidney disease, membranous nephropathy, age-related macular degeneration, atypical hemolytic uremic syndrome, thrombotic microangiopathy, myasthenia gravis, ischemia and reperfusion injury, paroxysmal nocturnal hemoglobinuria, and rheumatoid arthritis.

[0009] To date, only one therapeutic that targets the alternate pathway, e.g., the C5-C5a axis, is available for the treatment of complement component-associated diseases, the anti-C5 antibody, eculizumab (Soliris®). Although eculizumab has been shown to be effective for the treatment of paroxysmal nocturnal hemoglobinuria (PNH), atypical hemolytic uremic syndrome (aHUS), and Myasthenia Gravis, and is currently being evaluated in clinical trials for additional complement component-associated diseases, eculizumab therapy requires weekly high dose infusions followed by biweekly maintenance infusions at a high cost. Furthermore, approximately 50% of eculizumab-treated PNH subjects have low level of hemolysis and require residual transfusions (Hill A, et al. (2010) Haematologica 95(4):567-73).

[0010] Accordingly, there is a need in the art for compositions and methods for treating diseases, disorders, and conditions associated with complement activation by, for example, activation of complement factor B activity.

### SUMMARY OF THE INVENTION

[0011] The present invention provides iRNA compositions which affect the RNA-induced silencing complex (RISC)-mediated cleavage of RNA transcripts of a gene encoding complement factor B (CFB). The complement factor B (CFB) may be within a cell, e.g., a cell within a subject, such as a human subject.

[0012] Accordingly, in one aspect the invention provides a double stranded ribonucleic acid (dsRNA) agent for inhibiting expression of complement factor B (CFB) in a cell, wherein the dsRNA agent comprises a sense strand and an antisense strand forming a double stranded region, wherein the sense strand comprises at least 15 contiguous nucleotides differing by no more than 0, 1, 2, or 3 nucleotides from the nucleotide sequence of SEQ ID NO:1 and the antisense strand comprises at least 15 contiguous nucleotides differing by no more than 1, 2, or 3 nucleotides from the nucleotide sequence of SEQ ID NO:8. In certain embodiments, the sense strand comprises at least 15 contiguous nucleotides of the nucleotide sequence of SEQ ID NO:1 and the antisense strand comprises at least 15 contiguous nucleotides of the nucleotide sequence of SEQ ID NO:8. In certain embodiments, the sense strand comprises at least 17 contiguous nucleotides of the nucleotide sequence of SEQ ID NO:1 and the antisense strand comprises at least 17 contiguous nucleotides of the nucleotide sequence of SEQ ID NO:8. In certain embodiments, the sense strand comprises at least 19 contiguous nucleotides of the nucleotide sequence of SEQ ID NO:1 and the antisense strand comprises at least 19 contiguous nucleotides of the nucleotide sequence of SEQ ID NO:8.

[0013] In another aspect, the present invention provides a double stranded ribonucleic acid (dsRNA) for inhibiting expression of complement factor B (CFB) in a cell, wherein said dsRNA comprises a sense strand and an antisense strand forming a double stranded region, wherein the antisense strand comprises a region of complementarity to an mRNA encoding complement factor B (CFB), and wherein the region of complementarity comprises at least 15 contiguous nucleotides differing by no more than 0, 1, 2, or 3 nucleotides from any one of the antisense nucleotide sequences in any one of Tables 2-7, 13, 16, 19 and 20. In certain embodiments, the region of complementarity comprises at least 15 contiguous nucleotides of any one of the antisense nucleotide sequences in any one of Tables 2-7, 13, 16, 19 and 20. In certain embodiments, the region of complementarity comprises at least 17 contiguous nucleotides of any one of the antisense nucleotide sequences in any one of Tables 2-7, 13, 16, 19 and 20. In certain embodiments, the region of complementarity comprises at least 19 contiguous nucleotides of any one of the antisense nucleotide sequences in any one of Tables 2-7, 13, 16, 19 and 20. In certain embodiments, the region of complementarity comprises at least 20 contiguous nucleotides of any one of the antisense nucleotide sequences in any one of Tables 2-7, 13, 16, 19 and 20. In certain embodiments, the region of complementarity comprises at least 21 contiguous nucleotides of any one of the antisense nucleotide sequences in any one of Tables 2-7, 13, 16, 19 and 20.

[0014] In one aspect, the present invention provides a double stranded ribonucleic acid (dsRNA) for inhibiting expression of complement factor B (CFB) in a cell, wherein said dsRNA comprises a sense strand and an antisense strand forming a double stranded region, wherein the sense strand comprises at least 15 contiguous nucleotides differing by no more than three nucleotides from any one of the nucleotide sequence of nucleotides 633-665, 1133-1185, 1133-1173, 1133-1167, 1143-1173, 1540-1563, 1976-2002, 2386-2438, 2386-2418, 2386-2413, and 2389-1418 of SEQ ID NO: 1, and the antisense strand comprises at least 15 contiguous nucleotides from the corresponding nucleotide sequence of SEQ ID NO:8, where a substitution of a T with a U in either SEQ ID NO: 1 or SEQ ID NO: 8 does not count as a difference.

[0015] In another aspect, the present invention provides a double stranded ribonucleic acid (dsRNA) for inhibiting expression of complement factor B (CFB) in a cell, wherein said dsRNA comprises a sense strand and an antisense strand forming a double stranded region, wherein the sense strand comprises at least 15 contiguous nucleotides differing by no more than 0, 1, 2, or 3 nucleotides e.g., at least 15 nucleotides, at least 17 nucleotides, at least 19 nucleotides, or at least 20 nucleotides, from any one of the nucleotide sequence of nucleotides 633-655, 643-665, 928-950, 1133-1155, 1140-1162, 1141-1163, 1143-1165, 1145-1167, 1148-1170, 1150-1172, 1151-1173, 1185-1207, 1306-1328, 1534-1556, 1540-1562, 1541-1563, 1976-1998, 1979-2001, 1980-2002, 2078-2100, 2386-2408, 2388-2410, 2389-2411, 2391-2413, 2393-2415, 2395-2417, 2396-2418, 2438-2460, 2602-2624 of SEQ ID NO: 1, and the antisense strand comprises at least 15 contiguous nucleotides differing by no more than 0, 1, 2, or 3 nucleotides, e.g., at least 15 nucleotides, at least 17 nucleotides, at least 19 nucleotides, or at least 20 nucleotides, from the corresponding nucleotide sequence of SEQ ID NO:8, where a substitution of a T with a U in either SEQ ID NO: 1 or SEQ ID NO: 8 does not count as a difference.

[0016] In one embodiment, the antisense strand comprises at least 15 contiguous nucleotides differing by nor more than three nucleotides from any one of the antisense strand nucleotide sequences of a duplex selected from the group consisting of AD-560018, AD-559375, AD-559160, AD-559374, AD-559060, AD-559721, AD-559026, AD-558225, AD-557069, AD-558068, AD-557422, AD-558063, AD-558066, AD-556701, AD-558657, AD-559020, AD-559023, AD-558860, AD-560019, AD-560016, AD-559008, AD-559717, AD-557072, AD-558097, AD-557774, AD-557070, AD-558065, AD-557853, and AD-557079. In certain embodiments, the antisense strand comprises at least 15 contiguous nucleotides of any one of the selected duplexes. In certain embodiments, the antisense strand comprises at least 17 contiguous nucleotides of any one of the selected duplexes. In certain embodiments, the antisense strand comprises at least 19 contiguous nucleotides of any one of the selected duplexes. In certain embodiments, the antisense strand comprises at least 20 contiguous nucleotides of any one of the selected duplexes. In certain embodiments, the antisense strand comprises at least 21 contiguous nucleotides of any one of the selected duplexes.

[0017] In one embodiment, the sense strand comprises at least 15 contiguous nucleotides differing by nor more than three nucleotides from any one of the antisense strand nucleotide sequences of a duplex selected from the group consisting of AD-560018, AD-559375, AD-559160, AD-559374, AD-559060, AD-559721, AD-559026, AD-558225, AD-557069, AD-558068, AD-557422, AD-558063, AD-558066, AD-556701, AD-558657, AD-559020, AD-559023, AD-558860, AD-560019, AD-560016, AD-559008, AD-559717, AD-557072, AD-558097, AD-557774, AD-557070, AD-558065, AD-557853, and AD-557079. In certain embodiments, the sense strand comprises at least 15 contiguous nucleotides of any one of the selected duplexes. In certain embodiments, the sense strand comprises at least 17 contiguous nucleotides of any one of the selected duplexes. In certain embodiments, the sense strand comprises at least 19 contiguous nucleotides of any one of the selected duplexes. In certain embodiments, the sense strand comprises at least 20 contiguous nucleotides of any one of the selected duplexes. In certain embodiments, the sense strand comprises at least 21 contiguous nucleotides of any one of the selected duplexes.

[0018] In one aspect, the present invention provides a double stranded ribonucleic acid (dsRNA) for inhibiting expression of complement factor B (CFB) in a cell, wherein said dsRNA comprises a sense strand and an antisense strand forming a double stranded region, wherein the sense strand comprises at least 15 contiguous nucleotides differing by no more than 0, 1, 2, or 3 nucleotides e.g., at least 15 nucleotides, at least 17 nucleotides, at least 19 nucleotides, or at least 20 nucleotides, from any one of the nucleotide sequence of nucleotides 153-175; 202-224; 219-241; 254-276; 304-326; 321-343; 347-369; 402-424; 418-440; 447-469; 491-513; 528-550; 549-571; 566-588; 591-613; 792-814; 819-841; 967-989; 1042-1064; 1234-1256; 1250-1272; 1269-1291; 1335-1357; 1354-1376; 1372-1394; 1422-1444; 1496-1518; 1670-1692; 1716-1738; 1757-1779; 1774-1796; 1793-1815; 1844-1866; 1871-1893; 1909-1931; 1924-1947; 1947-1969; 2161-2183; 2310-2332; 2330-2352; 2355-2377; 2494-2516; and 2527-2549 of SEQ ID NO: 1, and the antisense strand comprises at least 15 contiguous nucleotides differing by no more than 0, 1, 2, or 3 nucleotides, e.g., at least 15 nucleotides, at least 17 nucleotides, at least 19 nucleotides, or at least 20 nucleotides, from the corresponding nucleotide sequence of SEQ ID NO:8, where a substitution of a T with a U in either SEQ ID NO: 1 or SEQ ID NO: 8 does not count as a difference.

[0019] In one embodiment, the antisense strand comprises at least 15 contiguous nucleotides differing by nor more than three nucleotides from any one of the antisense strand nucleotide sequences of a duplex selected from the group consisting of AD-560132.1; AD-560099.1; AD-559998.1; AD-559993.1; AD-559973.1; AD-559882.1; AD-559706.1; AD-559704.1; AD-559688.1; AD-559668.1; AD-559641.1; AD-559609.1; AD-559590.1; AD-559573.1; AD-559532.1; AD-559486.1; AD-559330.1; AD-559274.1; AD-559226.1; AD-559208.1; AD-559189.1; AD-559124.1; AD-559105.1; AD-559089.1; AD-558935.1; AD-558879.1; AD-558777.1; AD-558750.1; AD-558637.1; AD-558612.1; AD-558595.1; AD-558574.1; AD-558555.1; AD-558511.1; AD-558482.1; AD-558466.1; AD-558450.1; AD-558424.1; AD-558407.1; AD-558393.1; AD-558378.1; AD-558361.1; AD-558312.1. In certain embodiments, the antisense strand comprises at least 15 contiguous nucleotides of any one of the selected duplexes. In certain embodiments, the antisense strand comprises at least 17 contiguous nucleotides of any one of the selected duplexes. In certain embodiments, the antisense strand comprises at least 19 contiguous nucleotides of any one of the selected duplexes. In certain embodiments, the antisense strand comprises at least 20 contiguous nucleotides of any one of the selected duplexes. In certain embodiments, the antisense strand comprises at least 21 contiguous nucleotides of any one of the selected duplexes.

[0020] In one embodiment, the sense strand comprises at least 15 contiguous nucleotides differing by nor more than three nucleotides from any one of the antisense strand nucleotide sequences of a duplex selected from the group consisting of AD-560132.1; AD-560099.1; AD-559998.1; AD-559993.1; AD-559973.1; AD-559882.1; AD-559706.1; AD-559704.1; AD-559688.1; AD-559668.1; AD-559641.1; AD-559609.1; AD-559590.1; AD-559573.1; AD-559532.1; AD-559486.1; AD-559330.1; AD-559274.1; AD-559226.1; AD-559208.1; AD-559189.1; AD-559124.1; AD-559105.1; AD-559089.1; AD-558935.1; AD-558879.1; AD-558777.1; AD-558750.1; AD-558637.1; AD-558612.1; AD-558595.1; AD-558574.1; AD-558555.1; AD-558511.1; AD-558482.1; AD-558466.1; AD-558450.1; AD-558424.1; AD-558407.1; AD-558393.1; AD-558378.1; AD-558361.1; AD-558312.1. In certain embodiments, the sense strand comprises at least 15 contiguous nucleotides of any one of the selected duplexes. In certain embodiments, the sense strand comprises at least 17 contiguous nucleotides of any one of the selected duplexes. In certain embodiments, the sense strand comprises at least 19 contiguous nucleotides of any one of the selected duplexes. In certain embodiments, the sense strand comprises at least 20 contiguous nucleotides of any one of the selected duplexes. In certain embodiments, the sense strand comprises at least 21 contiguous nucleotides of any one of the selected duplexes.

[0021] In one embodiment, the dsRNA agent comprises at least one modified nucleotide.

[0022] In one embodiment, substantially all of the nucleotides of the sense strand; substantially all of the nucleotides of the antisense strand comprise a modification; or substantially all of the nucleotides of the sense strand and substantially all of the nucleotides of the antisense strand comprise a modification.

[0023] In one embodiment, all of the nucleotides of the sense strand comprise a modification; all of the nucleotides of the antisense strand comprise a modification; or all of the nucleotides of the sense strand and all of the nucleotides of the antisense strand comprise a modification.

[0024] In one embodiment, at least one of the modified nucleotides is selected from the group consisting of a deoxy-nucleotide, a 3′-terminal deoxythimidine (dT) nucleotide, a 2′-O-methyl modified nucleotide, a 2′-fluoro modified nucleotide, a 2′-deoxy-modified nucleotide, a locked nucleotide, an unlocked nucleotide, a conformationally restricted nucleotide, a constrained ethyl nucleotide, an abasic nucleotide, a 2′-amino-modified nucleotide, a 2′-O-allyl-modified nucleotide, 2′-C-alkyl-modified nucleotide, a 2′-methoxyethyl modified nucleotide, a 2′-O-alkyl-modified nucleotide, a morpholino nucleotide, a phosphoramidate, a non-natural base comprising nucleotide, a tetrahydropyran modified nucleotide, a 1,5-anhydrohexitol modified nucleotide, a cyclohexenyl modified nucleotide, a nucleotide comprising a phosphorothioate group, a nucleotide comprising a methylphosphonate group, a nucleotide comprising a 5′-phosphate, a nucleotide comprising a 5′-phosphate mimic, a nucleotide comprising a 2′-phosphate group, e.g., cytidine-2′-phosphate (C2p); guanosine-2′-phosphate (G2p); uridine-2′-phosphate (U2p); adenosine-2′-phosphate (A2p); a thermally destabilizing nucleotide, a glycol modified nucleotide (GNA), and a 2-O—(N-methylacetamide) modified nucleotide; and combinations thereof.

[0025] In one embodiment, the modifications on the nucleotides are selected from the group consisting of LNA, HNA, CeNA, 2′-methoxyethyl, 2′-O-alkyl, 2′-O-allyl, 2′-C-allyl, 2′-fluoro, 2′-deoxy, 2′-hydroxyl, and glycol; and combinations thereof.

[0026] In one embodiment, at least one of the modified nucleotides is selected from the group consisting of a deoxy-nucleotide, a 2′-O-methyl modified nucleotide, a 2′-fluoro modified nucleotide, a 2′-deoxy-modified nucleotide, a glycol modified nucleotide (GNA), e.g., Ggn, Cgn, Tgn, or Agn, a nucleotide comprising a 2′-phosphate group, and, a vinyl-phosphonate nucleotide; and combinations thereof.

[0027] In another embodiment, at least one of the modifications on the nucleotides is a thermally destabilizing nucleotide modification.

[0028] In one embodiment, the thermally destabilizing nucleotide modification is selected from the group consisting of an abasic modification; a mismatch with the opposing nucleotide in the duplex; and destabilizing sugar modification, a 2′-deoxy modification, an acyclic nucleotide, an unlocked nucleic acid (UNA), and a glycerol nucleic acid (GNA).

[0029] The double stranded region may be 19-30 nucleotide pairs in length; 19-25 nucleotide pairs in length; 19-23 nucleotide pairs in length; 23-27 nucleotide pairs in length; or 21-23 nucleotide pairs in length.

[0030] In one embodiment, each strand is independently no more than 30 nucleotides in length.

[0031] In one embodiment, the sense strand is 21 nucleotides in length and the antisense strand is 23 nucleotides in length.

[0032] The region of complementarity may be at least 17 nucleotides in length; 19-23 nucleotides in length; or 19 nucleotides in length.

[0033] In one embodiment, at least one strand comprises a 3′ overhang of at least 1 nucleotide. In another embodiment, at least one strand comprises a 3′ overhang of at least 2 nucleotides.

[0034] In one embodiment, the dsRNA agent further comprises a ligand.

[0035] In one embodiment, the ligand is conjugated to the 3′ end of the sense strand of the dsRNA agent.

[0036] In one embodiment, the ligand is an N-acetylgalactosamine (GalNAc) derivative.

[0037] In one embodiment, the ligand is one or more GalNAc derivatives attached through a monovalent, bivalent, or trivalent branched linker.

[0038] In one embodiment, the ligand is

[chemical structure]

[0039] In one embodiment, the dsRNA agent is conjugated to the ligand as shown in the following schematic

[chemical structure]

and, wherein X is O or S.

[0040] In one embodiment, the X is O.

[0041] In one embodiment, the dsRNA agent further comprises at least one phosphorothioate or methylphosphonate internucleotide linkage.

[0042] In one embodiment, the phosphorothioate or methylphosphonate internucleotide linkage is at the 3′-terminus of one strand, e.g., the antisense strand or the sense strand.

[0043] In another embodiment, the phosphorothioate or methylphosphonate internucleotide linkage is at the 5′-terminus of one strand, e.g., the antisense strand or the sense strand.

[0044] In one embodiment, the phosphorothioate or methylphosphonate internucleotide linkage is at the both the 5′- and 3′-terminus of one strand. In one embodiment, the strand is the antisense strand.

[0045] In one embodiment, the base pair at the 1 position of the 5′-end of the antisense strand of the duplex is an AU base pair.

[0046] The present invention also provides cells containing any of the dsRNA agents of the invention and pharmaceutical compositions comprising any of the dsRNA agents of the invention.

[0047] The pharmaceutical composition of the invention may include dsRNA agent in an unbuffered solution, e.g., saline or water, or the pharmaceutical composition of the invention may include the dsRNA agent is in a buffer solution, e.g., a buffer solution comprising acetate, citrate, prolamine, carbonate, or phosphate or any combination thereof; or phosphate buffered saline (PBS).

[0048] In one aspect, the present invention provides a method of inhibiting expression of a complement factor B (CFB) gene in a cell. The method includes contacting the cell with any of the dsRNAs of the invention or any of the pharmaceutical compositions of the invention, thereby inhibiting expression of the CFB gene in the cell.

[0049] In one embodiment, the cell is within a subject, e.g., a human subject, e.g., a subject having a complement factor B-associated disorder. Such disorders are typically associated with inflammation or immune system activation, e.g., membrane attack complex-mediated lysis, anaphylaxis, or hemolysis. Non-limiting examples of complement factor B-associated disorders include paroxysmal nocturnal hemoglobinuria (PNH), atypical hemolytic uremic syndrome (aHUS), asthma, rheumatoid arthritis (RA); antiphospholipid antibody syndrome; lupus nephritis; ischemia-reperfusion injury; typical or infectious hemolytic uremic syndrome (tHUS); dense deposit disease (DDD); neuromyelitis optica (NMO); multifocal motor neuropathy (MMN); multiple sclerosis (MS); macular degeneration (e.g., age-related macular degeneration (AMD)); hemolysis, elevated liver enzymes, and low platelets (HELLP) syndrome; thrombotic thrombocytopenic purpura (TTP); spontaneous fetal loss; Pauci-immune vasculitis; epidermolysis bullosa; recurrent fetal loss; pre-eclampsia, traumatic brain injury, myasthenia gravis, cold agglutinin disease, dermatomyositis bullous pemphigoid, Shiga toxin E. coli-related hemolytic uremic syndrome, C3 neuropathy, anti-neutrophil cytoplasmic antibody-associated vasculitis (e.g., granulomatosis with polyangiitis (previously known as Wegener granulomatosis), Churg-Strauss syndrome, and microscopic polyangiitis), humoral and vascular transplant rejection, graft dysfunction, myocardial infarction (e.g., tissue damage and ischemia in myocardial infarction), an allogenic transplant, sepsis (e.g., poor outcome in sepsis), Coronary artery disease, dermatomyositis, Graves' disease, atherosclerosis, Alzheimer's disease, systemic inflammatory response sepsis, septic shock, spinal cord injury, glomerulonephritis, Hashimoto's thyroiditis, type I diabetes, psoriasis, pemphigus, autoimmune hemolytic anemia (AIHA), ITP, Goodpasture syndrome, Degos disease, antiphospholipid syndrome (APS), catastrophic APS (CAPS), a cardiovascular disorder, myocarditis, a cerebrovascular disorder, a peripheral (e.g., musculoskeletal) vascular disorder, a renovascular disorder, a mesenteric/enteric vascular disorder, vasculitis, Henoch-Schönlein purpura nephritis, systemic lupus erythematosus-associated vasculitis, vasculitis associated with rheumatoid arthritis, immune complex vasculitis, Takayasu's disease, dilated cardiomyopathy, diabetic angiopathy, Kawasaki's disease (arteritis), venous gas embolus (VGE), and restenosis following stent placement, rotational atherectomy, and percutaneous transluminal coronary angioplasty (PTCA) (see, e.g., Holers (2008) Immunological Reviews 223:300-316; Holers and Thurman (2004) Molecular Immunology 41:147-152; U.S. Patent Publication No. 20070172483).

[0050] In one embodiment, the complement factor B-associate disease is selected from the group consisting of C3 glomerulopathy, systemic lupus erythematosus (SLE), e.g., Lupus Nephritis, IgA nephropathy, diabetic nephropathy, polycystic kidney disease, membranous nephropathy, age-related macular degeneration, atypical hemolytic uremic syndrome, thrombotic microangiopathy, myasthenia gravis, ischemia and reperfusion injury, paroxysmal nocturnal hemoglobinuria, and rheumatoid arthritis

[0051] In another embodiment, the complement factor B-associate disease is selected from the group consisting of C3 glomerulopathy, systemic lupus erythematosus (SLE), e.g., Lupus Nephritis, IgA nephropathy, diabetic nephropathy, and polycystic kidney disease.

[0052] In one embodiment, contacting the cell with the dsRNA agent inhibits the expression of CFB by at least 50%, 60%, 70%, 80%, 90%, or 95%.

[0053] In one embodiment, inhibiting expression of CFB decreases CFB protein level in serum of the subject by at least 50%, 60%, 70%, 80%, 90%, or 95%.

[0054] In one aspect, the present invention provides a method of treating a subject having a disorder that would benefit from reduction in complement factor B (CFB) expression. The method includes administering to the subject a therapeutically effective amount of any of the dsRNAs of the invention or any of the pharmaceutical compositions of the invention, thereby treating the subject having the disorder that would benefit from reduction in CFB expression.

[0055] In another aspect, the present invention provides a method of preventing development of a disorder that would benefit from reduction in complement factor B (CFB) expression in a subject having at least one sign or symptom of a disorder who does not yet meet the diagnostic criteria for that disorder. The method includes administering to the subject a prophylactically effective amount of any of the dsRNAs of the invention or any of the pharmaceutical compositions of the invention, thereby preventing the subject progressing to meet the diagnostic criteria of the disorder that would benefit from reduction in CFB expression.

[0056] In one embodiment, the disorder is a complement factor B- (CFB)-associated disorder.

[0057] In one embodiment, the subject is human.

[0058] In one embodiment, the dsRNA agent is administered to the subject at a dose of about 0.01 mg/kg to about 50 mg/kg.

[0059] In one embodiment, the dsRNA agent is administered to the subject subcutaneously.

[0060] In one embodiment, the level of CFB in the subject sample(s) is a CFB protein level in a blood or serum sample(s).

[0061] In one embodiment, the administration of the agent to the subject causes a decrease in hemolysis or a decrease in CFB protein accumulation.

[0062] In certain embodiments, the methods of the invention further comprise administering to the subject an additional therapeutic agent.

[0063] In some aspects, the additional therapeutic agent is an iRNA agent targeting a C5 gene, such as those described in U.S. Pat. No. 9,249,415, the entire contents of which are hereby incorporated herein by reference.

[0064] In other aspects, the additional therapeutic agent is an iRNA agent targeting a complement factor B (CFB) gene, such as those described in U.S. Pat. No. 10,465,194, the entire contents of which are hereby incorporated herein by reference.

[0065] In other aspects, the additional therapeutic agent is an inhibitor of C5, such as an anti-complement component C5 antibody, or antigen-binding fragment thereof (e.g., eculizumab, ravulizumab-cwvz, or pozelimab (REGN3918)) or a C5 peptide inhibitor (e.g., zilucoplan). Eculizumab is a humanized monoclonal IgG2/4, kappa light chain antibody that specifically binds complement component C5 with high affinity and inhibits cleavage of C5 to C5a and C5b, thereby inhibiting the generation of the terminal complement complex C5b-9. Eculizumab is described in U.S. Pat. No. 6,355,245, the entire contents of which are incorporated herein by reference. Ravulizumab-cwvz is a humanized IgG2/4 monoclonal antibody that specifically binds complement component C5 with high affinity and inhibits cleavage of C5 to C5a and C5b, thereby inhibiting the generation of the terminal complement complex C5b-9. Ravulizumab-cwvz is described in WO2015134894, the entire contents of which are incorporated herein by reference. Pozelimab (also known as H4H12166P, described in US20170355757, the entire contents of which are incorporated herein by reference) is a fully-human IgG4 monoclonal antibody designed to block complement factor C5. Zilucoplan is a synthetic, macrocyclic peptide that binds complement component 5 (C5) with sub-nanomolar affinity and allosterically inhibits its cleavage into C5a and C5b upon activation of the classical, alternative, or lectin pathways (see, e.g., WO2017105939, the entire contents of which are incorporated herein by reference).

[0066] In yet other aspects, the additional therapeutic is a C3 peptide inhibitor, or analog thereof. In one embodiment, the C3 peptide inhibitor is compstatin. Compstatin is a cyclic tridecapeptide with potent and selective C3 inhibitory activity. Compstatin, and its analogs, are described in U.S. Pat. Nos. 7,888,323, 7,989,589, and 8,442,776, in U.S. Patent Publication No. 2012/0178694 and 2013/0053302, and in PCT Publication Nos. WO 2012/174055, WO 2012/2178083, WO 2013/036778, the entire contents of each of which are incorporated herein by reference.

[0067] In certain embodiments, treatments known in the art for the various CFB-associated diseases are used in combination with the RNAi agents of the invention.

[0068] The present invention also provides kits comprising any of the dsRNAs of the invention or any of the pharmaceutical compositions of the invention, and optionally, instructions for use.

### BRIEF DESCRIPTION OF THE DRAWINGS

[0069] FIG. 1 depicts the three complement pathways: alternative, classical and lectin.

[0070] FIG. 2A is a heatmap depicting the effect of dual targeting of C3 and CFB on alternative hemolytic activity in human sera in vitro.

[0071] FIG. 2B is a heatmap depicting the effect of dual targeting of C3 and C5 on alternative hemolytic activity in human sera in vitro.

[0072] FIG. 2C is a heatmap depicting the effect of dual targeting of C3 and C5 on classical hemolytic activity in human sera in vitro.

[0073] FIG. 2D is a heatmap depicting the effect of dual targeting of C3 and C5 on classical hemolytic activity as determined by the Wieslab® Complement Classical Pathway (CCP) assay in human sera in vitro.

[0074] FIG. 3A is a graph depicting the effect of administration of a single 6 mg/kg dose of a dsRNA agent targeting C3; or a dsRNA agent targeting CFB; or a dsRNA agent targeting C5; or a single 6 mg/kg dose of a dsRNA agent targeting C3 and a single 6 mg/kg dose of a dsRNA agent targeting CFB; or a single 6 mg/kg dose of a dsRNA agent targeting C3 and a single 6 mg/kg dose of a dsRNA agent targeting C5; or a single 6 mg/kg dose of a dsRNA agent targeting CFB and a single 6 mg/kg dose of a dsRNA agent targeting C5 on C3 protein levels, CFB protein levels or C5 protein levels in the sera of non-human primates.

[0075] FIG. 3B is a graph depicting the effect of administration of a single 6 mg/kg dose of a dsRNA agent targeting C3; or a dsRNA agent targeting CFB; or a dsRNA agent targeting C5; or a single 6 mg/kg dose of a dsRNA agent targeting C3 and a single 6 mg/kg dose of a dsRNA agent targeting CFB; or a single 6 mg/kg dose of a dsRNA agent targeting C3 and a single 6 mg/kg dose of a dsRNA agent targeting C5; or a single 6 mg/kg dose of a dsRNA agent targeting CFB and a single 6 mg/kg dose of a dsRNA agent targeting C5 on alternative hemolytic activity in the sera of non-human primates.

[0076] FIG. 3C is a graph depicting the effect of administration of a single 6 mg/kg dose of a dsRNA agent targeting C3; or a dsRNA agent targeting CFB; or a dsRNA agent targeting C5; or a single 6 mg/kg dose of a dsRNA agent targeting C3 and a single 6 mg/kg dose of a dsRNA agent targeting CFB; or a single 6 mg/kg dose of a dsRNA agent targeting C3 and a single 6 mg/kg dose of a dsRNA agent targeting C5; or a single 6 mg/kg dose of a dsRNA agent targeting CFB and a single 6 mg/kg dose of a dsRNA agent targeting C5 on classical hemolytic activity in the sera of non-human primates.

[0077] FIG. 3D is a graph depicting the effect of administration of a single 6 mg/kg dose of a dsRNA agent targeting C3; or a dsRNA agent targeting CFB; or a dsRNA agent targeting C5; or a single 6 mg/kg dose of a dsRNA agent targeting C3 and a single 6 mg/kg dose of a dsRNA agent targeting CFB; or a single 6 mg/kg dose of a dsRNA agent targeting C3 and a single 6 mg/kg dose of a dsRNA agent targeting C5; or a single 6 mg/kg dose of a dsRNA agent targeting CFB and a single 6 mg/kg dose of a dsRNA agent targeting C5 on alternative hemolytic activity as determined by the Wieslab® Complement Alternative Pathway (CAP) assay in the sera of non-human primates.

[0078] FIG. 3E is a graph depicting the effect of administration of a single 6 mg/kg dose of a dsRNA agent targeting C3; or a dsRNA agent targeting CFB; or a dsRNA agent targeting C5; or a single 6 mg/kg dose of a dsRNA agent targeting C3 and a single 6 mg/kg dose of a dsRNA agent targeting CFB; or a single 6 mg/kg dose of a dsRNA agent targeting C3 and a single 6 mg/kg dose of a dsRNA agent targeting C5; or a single 6 mg/kg dose of a dsRNA agent targeting CFB and a single 6 mg/kg dose of a dsRNA agent targeting C5 on alternative hemolytic activity as determined by the Wieslab® Complement Classical Pathway (CCP) assay in the sera of non-human primates.

### DETAILED DESCRIPTION OF THE INVENTION

[0079] The present invention provides iRNA compositions which effect the RNA-induced silencing complex (RISC)-mediated cleavage of RNA transcripts of a complement factor B (CFB) gene. The gene may be within a cell, e.g., a cell within a subject, such as a human. The use of these iRNAs enables the targeted degradation of mRNAs of the corresponding gene (complement factor B gene) in mammals.

[0080] The iRNAs of the invention have been designed to target the human complement factor B gene, including portions of the gene that are conserved in the complement factor B orthologs of other mammalian species. Without intending to be limited by theory, it is believed that a combination or sub-combination of the foregoing properties and the specific target sites or the specific modifications in these iRNAs confer to the iRNAs of the invention improved efficacy, stability, potency, durability, and safety.

[0081] Accordingly, the present invention provides methods for treating and preventing a complement factor B-associated disorder, disease, or condition, e.g., a disorder, disease, or condition with inflammation or immune system activation, e.g., membrane attack complex-mediated lysis, anaphylaxis, or hemolysis, e.g., C3 glomerulopathy, systemic lupus erythematosus (SLE), e.g., Lupus Nephritis, IgA nephropathy, diabetic nephropathy, and polycystic kidney disease, using iRNA compositions which effect the RNA-induced silencing complex (RISC)-mediated cleavage of RNA transcripts of a complement factor B gene.

[0082] The iRNAs of the invention include an RNA strand (the antisense strand) having a region which is up to about 30 nucleotides or less in length, e.g., 19-30, 19-29, 19-28, 19-27, 19-26, 19-25, 19-24, 19-23, 19-22, 19-21, 19-20, 20-30, 20-29, 20-28, 20-27, 20-26, 20-25, 20-24, 20-23, 20-22, 20-21, 21-30, 21-29, 21-28, 21-27, 21-26, 21-25, 21-24, 21-23, or 21-22 nucleotides in length, which region is substantially complementary to at least part of an mRNA transcript of a complement factor B gene. In certain embodiments, the RNAi agents of the disclosure include an RNA strand (the antisense strand) having a region which is about 21-23 nucleotides in length, which region is substantially complementary to at least part of an mRNA transcript of a complement factor B gene.

[0083] In certain embodiments, one or both of the strands of the double stranded RNAi agents of the invention is up to 66 nucleotides in length, e.g., 36-66, 26-36, 25-36, 31-60, 22-43, 27-53 nucleotides in length, with a region of at least 19 contiguous nucleotides that is substantially complementary to at least a part of an mRNA transcript of a complement factor B gene. In some embodiments, such iRNA agents having longer length antisense strands may include a second RNA strand (the sense strand) of 20-60 nucleotides in length wherein the sense and antisense strands form a duplex of 18-30 contiguous nucleotides.

[0084] The use of iRNAs of the invention enables the targeted degradation of mRNAs of the corresponding gene (complement factor B gene) in mammals. Using in vitro and in vivo assays, the present inventors have demonstrated that iRNAs targeting a complement factor B gene can potently mediate RNAi, resulting in significant inhibition of expression of a complement factor B gene. Thus, methods and compositions including these iRNAs are useful for treating a subject having a complement factor B-associated disorder, e.g., C3 glomerulopathy, systemic lupus erythematosus (SLE), e.g., Lupus Nephritis, IgA nephropathy, diabetic nephropathy, and polycystic kidney disease.

[0085] Accordingly, the present invention provides methods and combination therapies for treating a subject having a disorder that would benefit from inhibiting or reducing the expression of a complement factor B gene, e.g., a complement factor B-associated disease, such as C3 glomerulopathy, systemic lupus erythematosus (SLE), e.g., Lupus Nephritis, IgA nephropathy, diabetic nephropathy, and polycystic kidney disease, using iRNA compositions which effect the RNA-induced silencing complex (RISC)-mediated cleavage of RNA transcripts of a CFB gene.

[0086] The present invention also provides methods for preventing at least one symptom in a subject having a disorder that would benefit from inhibiting or reducing the expression of a complement factor B gene, e.g., C3 glomerulopathy, systemic lupus erythematosus (SLE), e.g., Lupus Nephritis, IgA nephropathy, diabetic nephropathy, and polycystic kidney disease.

[0087] In certain embodiments, the administration of the dsRNA to the subject causes a decrease in CFB mRNA level, CFB protein level, CH₅₀ activity (a measure of total hemolytic complement), AH₅₀ (a measure the hemolytic activity of the alternate pathway of complement), lactate dehydrogenase (LDH) (a measure of intravascular hemolysis), hemoglobin levels; the level of any one or more of C3, C9, C5, C5a, C5b, and soluble C5b-9 complex.

[0088] The following detailed description discloses how to make and use compositions containing iRNAs to inhibit the expression of a complement factor B gene as well as compositions, uses, and methods for treating subjects that would benefit from inhibition or reduction of the expression of a complement factor B gene, e.g., subjects susceptible to or diagnosed with a complement factor B-associated disorder.

### I. Definitions

[0089] In order that the present invention may be more readily understood, certain terms are first defined. In addition, it should be noted that whenever a value or range of values of a parameter are recited, it is intended that values and ranges intermediate to the recited values are also intended to be part of this invention.

[0090] The articles “a” and “an” are used herein to refer to one or to more than one (i.e., to at least one) of the grammatical object of the article. By way of example, “an element” means one element or more than one element, e.g., a plurality of elements.

[0091] The term “including” is used herein to mean, and is used interchangeably with, the phrase “including but not limited to”.

[0092] The term “or” is used herein to mean, and is used interchangeably with, the term “and/or,” unless context clearly indicates otherwise. For example, “sense strand or antisense strand” is understood as “sense strand or antisense strand or sense strand and antisense strand.”

[0093] The term “about” is used herein to mean within the typical ranges of tolerances in the art. For example, “about” can be understood as about 2 standard deviations from the mean. In certain embodiments, about means ±10%. In certain embodiments, about means ±5%. When about is present before a series of numbers or a range, it is understood that “about” can modify each of the numbers in the series or range.

[0094] The term “at least”, “no less than” or “or more” prior to a number or series of numbers is understood to include the number adjacent to the term “at least”, and all subsequent numbers or integers that could logically be included, as clear from context. For example, the number of nucleotides in a nucleic acid molecule must be an integer. For example, “at least 19 nucleotides of a 21 nucleotide nucleic acid molecule” means that 19, 20, or 21 nucleotides have the indicated property. When at least is present before a series of numbers or a range, it is understood that “at least” can modify each of the numbers in the series or range.

[0095] As used herein, “no more than” or “or less” is understood as the value adjacent to the phrase and logical lower values or integers, as logical from context, to zero. For example, a duplex with an overhang of “no more than 2 nucleotides” has a 2, 1, or 0 nucleotide overhang. When “no more than” is present before a series of numbers or a range, it is understood that “no more than” can modify each of the numbers in the series or range. As used herein, ranges include both the upper and lower limit.

[0096] As used herein, methods of detection can include determination that the amount of analyte present is below the level of detection of the method.

[0097] In the event of a conflict between an indicated target site and the nucleotide sequence for a sense or antisense strand, the indicated sequence takes precedence.

[0098] In the event of a conflict between a sequence and its indicated site on a transcript or other sequence, the nucleotide sequence recited in the specification takes precedence.

[0099] As used herein, the term “Complement Factor B,” used interchangeably with the term “CFB,” refers to the well-known gene and polypeptide, also known in the art as AHUS, BF, CFAB, BFD, FB, GBG, FBI12, B-Factor, Properdin, H2-Bf, Glycine-Rich Beta Glycoprotein, C3 Proaccelerator, Properdin Factor 2B, C3 Proactivator, PBF2, Glycine-Rich Beta-Glycoprotein, C3/C5 Convertase, EC 3.4.21, and EC 3.4.21.473.

[0100] The term “CFB” includes human CFB, the amino acid and nucleotide sequence of which may be found in, for example, GenBank Accession No. GI:189181756; mouse CFB, the amino acid and nucleotide sequence of which may be found in, for example, GenBank Accession Nos. GI:218156288 and GI:218156290; rat CFB, the amino acid and nucleotide sequence of which may be found in, for example, GenBank Accession No. GI:218156284; and chimpanzee CFB, the amino acid and nucleotide sequence of which may be found in, for example, GenBank Accession No. GI:57114201.

[0101] The term “CFB” also includes Macacafascicularis CFB, the amino acid and nucleotide sequence of which may be found in, for example, GenBank Accession No. GI:544428919 and in the entry for the gene, ENSMMUP00000000985 (locus=scaffold3881:47830:53620), in the Macaca genome project web site (macque.genomics.org.cn/page/species/index.jsp). Additional examples of CFB mRNA sequences are readily available using, e.g., GenBank, UniProt, OMIM, and the Macaca genome project web site.

[0102] Exemplary CFB nucleotide sequences may also be found in SEQ ID NOs:1-7. SEQ ID NOs:8-14 are the antisense sequences of SEQ ID NOs: 1-7, respectively.

[0103] The term “CFB,” as used herein, also refers to naturally occurring DNA sequence variations of the CFB gene. Non-limiting examples of sequence variations within the CFB gene include 1598A>G in exon 12, which results in a lysine being changed to an arginine at amino acid residue 533; 858C>G in exon 6, which results in a phenylalanine being changed to a leucine at amino acid residue 286; and 967A>G in exon 7, which results in a lysine being changed to an alanine at amino acid residue 323 (Tawadrous H. et al. (2010) Pediatr Nephrol. 25:947; Goicoechea de Jorge E et al. (2007) Proc Natl Acad Sci. USA 104:240). The term “CFB,” as used herein, also refers to single nucleotide polymorphisms in the CFB gene. Numerous sequence variations within the CFB gene have been identified and may be found at, for example, NCBI dbSNP and UniProt (see, e.g., ncbi.nlm.nih.gov/snp).

[0104] Further information on CFB can be found, for example, at www.ncbi.nlm.nih.gov/gene/629.

[0105] Additional examples of CFB mRNA sequences are readily available through publicly available databases, e.g., GenBank, UniProt, OMIM, and the Macaca genome project web site.

[0106] The entire contents of each of the foregoing GenBank Accession numbers and the Gene database numbers are incorporated herein by reference as of the date of filing this application.

[0107] As used herein, “target sequence” refers to a contiguous portion of the nucleotide sequence of an mRNA molecule formed during the transcription of a complement factor B gene, including mRNA that is a product of RNA processing of a primary transcription product. The target portion of the sequence will be at least long enough to serve as a substrate for iRNA-directed cleavage at or near that portion of the nucleotide sequence of an mRNA molecule formed during the transcription of a CFB gene. In one embodiment, the target sequence is within the protein coding region of CFB.

[0108] The target sequence may be from about 19-36 nucleotides in length, e.g., about 19-30 nucleotides in length. For example, the target sequence can be about 19-30 nucleotides, 19-30, 19-29, 19-28, 19-27, 19-26, 19-25, 19-24, 19-23, 19-22, 19-21, 19-20, 20-30, 20-29, 20-28, 20-27, 20-26, 20-25, 20-24, 20-23, 20-22, 20-21, 21-30, 21-29, 21-28, 21-27, 21-26, 21-25, 21-24, 21-23, or 21-22 nucleotides in length. In some embodiments, the target sequence is about 19 to about 30 nucleotides in length. In other embodiments, the target sequence is about 19 to about 25 nucleotides in length. In still other embodiments, the target sequence is about 19 to about 23 nucleotides in length. In some embodiments, the target sequence is about 21 to about 23 nucleotides in length. Ranges and lengths intermediate to the above recited ranges and lengths are also contemplated to be part of the invention.

[0109] As used herein, the term “strand comprising a sequence” refers to an oligonucleotide comprising a chain of nucleotides that is described by the sequence referred to using the standard nucleotide nomenclature.

[0110] “G,” “C,” “A,” “T,” and “U” each generally stand for a nucleotide that contains guanine, cytosine, adenine, thymidine, and uracil as a base, respectively. However, it will be understood that the term “ribonucleotide” or “nucleotide” can also refer to a modified nucleotide, as further detailed below, or a surrogate replacement moiety (see, e.g., Table 1). The skilled person is well aware that guanine, cytosine, adenine, and uracil can be replaced by other moieties without substantially altering the base pairing properties of an oligonucleotide comprising a nucleotide bearing such replacement moiety. For example, without limitation, a nucleotide comprising inosine as its base can base pair with nucleotides containing adenine, cytosine, or uracil. Hence, nucleotides containing uracil, guanine, or adenine can be replaced in the nucleotide sequences of dsRNA featured in the invention by a nucleotide containing, for example, inosine. In another example, adenine and cytosine anywhere in the oligonucleotide can be replaced with guanine and uracil, respectively to form G-U Wobble base pairing with the target mRNA. Sequences containing such replacement moieties are suitable for the compositions and methods featured in the invention.

[0111] The terms “iRNA”, “RNAi agent,” “iRNA agent,”, “RNA interference agent” as used interchangeably herein, refer to an agent that contains RNA as that term is defined herein, and which mediates the targeted cleavage of an RNA transcript via an RNA-induced silencing complex (RISC) pathway. iRNA directs the sequence-specific degradation of mRNA through a process known as RNA interference (RNAi). The iRNA modulates, e.g., inhibits, the expression of a complement factor B gene in a cell, e.g., a cell within a subject, such as a mammalian subject.

[0112] In one embodiment, an RNAi agent of the invention includes a single stranded RNA that interacts with a target RNA sequence, e.g., a complement factor B target mRNA sequence, to direct the cleavage of the target RNA. Without wishing to be bound by theory it is believed that long double stranded RNA introduced into cells is broken down into siRNA by a Type III endonuclease known as Dicer (Sharp et al. (2001) Genes Dev. 15:485). Dicer, a ribonuclease-III-like enzyme, processes the dsRNA into 19-23 base pair short interfering RNAs with characteristic two base 3′ overhangs (Bernstein, et al., (2001) Nature 409:363). The siRNAs are then incorporated into an RNA-induced silencing complex (RISC) where one or more helicases unwind the siRNA duplex, enabling the complementary antisense strand to guide target recognition (Nykanen, et al., (2001) Cell 107:309). Upon binding to the appropriate target mRNA, one or more endonucleases within the RISC cleave the target to induce silencing (Elbashir, et al., (2001) Genes Dev. 15:188). Thus, in one aspect the invention relates to a single stranded RNA (siRNA) generated within a cell and which promotes the formation of a RISC complex to effect silencing of the target gene, i.e., a complement factor B (CFB) gene. Accordingly, the term “siRNA” is also used herein to refer to an iRNA as described above.

[0113] In certain embodiments, the RNAi agent may be a single-stranded siRNA (ssRNAi) that is introduced into a cell or organism to inhibit a target mRNA. Single-stranded RNAi agents bind to the RISC endonuclease, Argonaute 2, which then cleaves the target mRNA. The single-stranded siRNAs are generally 15-30 nucleotides and are chemically modified. The design and testing of single-stranded siRNAs are described in U.S. Pat. No. 8,101,348 and in Lima et al., (2012) Cell 150:883-894, the entire contents of each of which are hereby incorporated herein by reference. Any of the antisense nucleotide sequences described herein may be used as a single-stranded siRNA as described herein or as chemically modified by the methods described in Lima et al., (2012) Cell 150:883-894.

[0114] In certain embodiments, an “iRNA” for use in the compositions, uses, and methods of the invention is a double stranded RNA and is referred to herein as a “double stranded RNA agent,” “double stranded RNA (dsRNA) molecule,” “dsRNA agent,” or “dsRNA”. The term “dsRNA”, refers to a complex of ribonucleic acid molecules, having a duplex structure comprising two anti-parallel and substantially complementary nucleic acid strands, referred to as having “sense” and “antisense” orientations with respect to a target RNA, i.e., a complement factor B (CFB) gene. In some embodiments of the invention, a double stranded RNA (dsRNA) triggers the degradation of a target RNA, e.g., an mRNA, through a post-transcriptional gene-silencing mechanism referred to herein as RNA interference or RNAi.

[0115] As used herein, the term “modified nucleotide” refers to a nucleotide having, independently, a modified sugar moiety, a modified internucleotide linkage, or modified nucleobase, or any combination thereof. Thus, the term modified nucleotide encompasses substitutions, additions or removal of, e.g., a functional group or atom, to internucleoside linkages, sugar moieties, or nucleobases. The modifications suitable for use in the agents of the invention include all types of modifications disclosed herein or known in the art. Any such modifications, as used in a siRNA type molecule, are encompassed by “iRNA” or “RNAi agent” for the purposes of this specification and claims.

[0116] In certain embodiments of the instant disclosure, inclusion of a deoxy-nucleotide—which is acknowledged as a naturally occurring form of nucleotide—if present within a RNAi agent can be considered to constitute a modified nucleotide.

[0117] The duplex region may be of any length that permits specific degradation of a desired target RNA through a RISC pathway, and may range from about 19 to 36 base pairs in length, e.g., about 19-30 base pairs in length, for example, about 9, 10, 11, 12, 13, 14, 15, 16, 17, 18, 19, 20, 21, 22, 23, 24, 25, 26, 27, 28, 29, 30, 31, 32, 33, 34, 35, or 36 base pairs in length, such as about 19-30, 19-29, 19-28, 19-27, 19-26, 19-25, 19-24, 19-23, 19-22, 19-21, 19-20, 20-30, 20-29, 20-28, 20-27, 20-26, 20-25, 20-24, 20-23, 20-22, 20-21, 21-30, 21-29, 21-28, 21-27, 21-26, 21-25, 21-24, 21-23, or 21-22 base pairs in length. In certain embodiments, the duplex region is 19-21 base pairs in length, e.g., 21 base pairs in length. Ranges and lengths intermediate to the above recited ranges and lengths are also contemplated to be part of the disclosure.

[0118] The two strands forming the duplex structure may be different portions of one larger RNA molecule, or they may be separate RNA molecules. Where the two strands are part of one larger molecule, and therefore are connected by an uninterrupted chain of nucleotides between the 3′-end of one strand and the 5′-end of the respective other strand forming the duplex structure, the connecting RNA chain is referred to as a “hairpin loop.” A hairpin loop can comprise at least one unpaired nucleotide. In some embodiments, the hairpin loop can comprise at least 4, 5, 6, 7, 8, 9, 10, 20, 23 or more unpaired nucleotides. In some embodiments, the hairpin loop can be 10 or fewer nucleotides. In some embodiments, the hairpin loop can be 8 or fewer unpaired nucleotides. In some embodiments, the hairpin loop can be 4-10 unpaired nucleotides. In some embodiments, the hairpin loop can be 4-8 nucleotides.

[0119] In certain embodiment, the two strands of double-stranded oligomeric compound can be linked together. The two strands can be linked to each other at both ends, or at one end only. By linking at one end is meant that 5′-end of first strand is linked to the 3′-end of the second strand or 3′-end of first strand is linked to 5′-end of the second strand. When the two strands are linked to each other at both ends, 5′-end of first strand is linked to 3′-end of second strand and 3′-end of first strand is linked to 5′-end of second strand. The two strands can be linked together by an oligonucleotide linker including, but not limited to, (N)n; wherein N is independently a modified or unmodified nucleotide and n is 3-23. In some embodiments, n is 3-10, e.g., 3, 4, 5, 6, 7, 8, 9, or 10. In some embodiments, the oligonucleotide linker is selected from the group consisting of GNRA, (G)4, (U)4, and (dT)4, wherein N is a modified or unmodified nucleotide and R is a modified or unmodified purine nucleotide. Some of the nucleotides in the linker can be involved in base-pair interactions with other nucleotides in the linker. The two strands can also be linked together by a non-nucleosidic linker, e.g. a linker described herein. It will be appreciated by one of skill in the art that any oligonucleotide chemical modifications or variations describe herein can be used in the oligonucleotide linker.

[0120] Hairpin and dumbbell type oligomeric compounds will have a duplex region equal to or at least 14, 15, 15, 16, 17, 18, 19, 29, 21, 22, 23, 24, or 25 nucleotide pairs. The duplex region can be equal to or less than 200, 100, or 50, in length. In some embodiments, ranges for the duplex region are 15-30, 17 to 23, 19 to 23, and 19 to 21 nucleotides pairs in length.

[0121] The hairpin oligomeric compounds can have a single strand overhang or terminal unpaired region, in some embodiments at the 3′, and in some embodiments on the antisense side of the hairpin. In some embodiments, the overhangs are 1-4, more generally 2-3 nucleotides in length. The hairpin oligomeric compounds that can induce RNA interference are also referred to as “shRNA” herein.

[0122] Where the two substantially complementary strands of a dsRNA are comprised by separate RNA molecules, those molecules need not be, but can be covalently connected. Where the two strands are connected covalently by means other than an uninterrupted chain of nucleotides between the 3′-end of one strand and the 5′-end of the respective other strand forming the duplex structure, the connecting structure is referred to as a “linker.” The RNA strands may have the same or a different number of nucleotides. The maximum number of base pairs is the number of nucleotides in the shortest strand of the dsRNA minus any overhangs that are present in the duplex. In addition to the duplex structure, an RNAi may comprise one or more nucleotide overhangs. In one embodiment of the RNAi agent, at least one strand comprises a 3′ overhang of at least 1 nucleotide. In another embodiment, at least one strand comprises a 3′ overhang of at least 2 nucleotides, e.g., 2, 3, 4, 5, 6, 7, 9, 10, 11, 12, 13, 14, or 15 nucleotides. In other embodiments, at least one strand of the RNAi agent comprises a 5′ overhang of at least 1 nucleotide. In certain embodiments, at least one strand comprises a 5′ overhang of at least 2 nucleotides, e.g., 2, 3, 4, 5, 6, 7, 9, 10, 11, 12, 13, 14, or 15 nucleotides. In still other embodiments, both the 3′ and the 5′ end of one strand of the RNAi agent comprise an overhang of at least 1 nucleotide.

[0123] In certain embodiments, an iRNA agent of the invention is a dsRNA, each strand of which comprises 19-23 nucleotides, that interacts with a target RNA sequence, e.g., a complement factor B (CFB) gene, to direct cleavage of the target RNA.

[0124] In some embodiments, an iRNA of the invention is a dsRNA of 24-30 nucleotides that interacts with a target RNA sequence, e.g., a CFB target mRNA sequence, to direct the cleavage of the target RNA.

[0125] As used herein, the term “nucleotide overhang” refers to at least one unpaired nucleotide that protrudes from the duplex structure of a double stranded iRNA. For example, when a 3′-end of one strand of a dsRNA extends beyond the 5′-end of the other strand, or vice versa, there is a nucleotide overhang. A dsRNA can comprise an overhang of at least one nucleotide; alternatively, the overhang can comprise at least two nucleotides, at least three nucleotides, at least four nucleotides, at least five nucleotides or more. A nucleotide overhang can comprise or consist of a nucleotide/nucleoside analog, including a deoxynucleotide/nucleoside. The overhang(s) can be on the sense strand, the antisense strand, or any combination thereof. Furthermore, the nucleotide(s) of an overhang can be present on the 5′-end, 3′-end, or both ends of either an antisense or sense strand of a dsRNA.

[0126] In one embodiment of the dsRNA, at least one strand comprises a 3′ overhang of at least 1 nucleotide. In another embodiment, at least one strand comprises a 3′ overhang of at least 2 nucleotides, e.g., 2, 3, 4, 5, 6, 7, 9, 10, 11, 12, 13, 14, or 15 nucleotides. In other embodiments, at least one strand of the RNAi agent comprises a 5′ overhang of at least 1 nucleotide. In certain embodiments, at least one strand comprises a 5′ overhang of at least 2 nucleotides, e.g., 2, 3, 4, 5, 6, 7, 9, 10, 11, 12, 13, 14, or 15 nucleotides. In still other embodiments, both the 3′ and the 5′ end of one strand of the RNAi agent comprise an overhang of at least 1 nucleotide.

[0127] In one embodiment, the antisense strand of a dsRNA has a 1-10 nucleotide, e.g., a 1, 2, 3, 4, 5, 6, 7, 8, 9, or 10 nucleotide, overhang at the 3′-end or the 5′-end. In one embodiment, the sense strand of a dsRNA has a 1-10 nucleotide, e.g., a 1, 2, 3, 4, 5, 6, 7, 8, 9, or 10 nucleotide, overhang at the 3′-end or the 5′-end. In another embodiment, one or more of the nucleotides in the overhang is replaced with a nucleoside thiophosphate.

[0128] In certain embodiments, the antisense strand of a dsRNA has a 1-10 nucleotides, e.g., a 1, 2, 3, 4, 5, 6, 7, 8, 9, or 10 nucleotide, overhang at the 3′-end or the 5′-end. In certain embodiments, the overhang on the sense strand or the antisense strand, or both, can include extended lengths longer than 10 nucleotides, e.g., 1-30 nucleotides, 2-30 nucleotides, 10-30 nucleotides, 10-25 nucleotides, 10-20 nucleotides, or 10-15 nucleotides in length. In certain embodiments, an extended overhang is on the sense strand of the duplex. In certain embodiments, an extended overhang is present on the 3′ end of the sense strand of the duplex. In certain embodiments, an extended overhang is present on the 5′ end of the sense strand of the duplex. In certain embodiments, an extended overhang is on the antisense strand of the duplex. In certain embodiments, an extended overhang is present on the 3′end of the antisense strand of the duplex. In certain embodiments, an extended overhang is present on the 5′end of the antisense strand of the duplex. In certain embodiments, one or more of the nucleotides in the extended overhang is replaced with a nucleoside thiophosphate. In certain embodiments, the overhang includes a self-complementary portion such that the overhang is capable of forming a hairpin structure that is stable under physiological conditions.

[0129] “Blunt” or “blunt end” means that there are no unpaired nucleotides at that end of the double stranded RNA agent, i.e., no nucleotide overhang. A “blunt ended” double stranded RNA agent is double stranded over its entire length, i.e., no nucleotide overhang at either end of the molecule. The RNAi agents of the invention include RNAi agents with no nucleotide overhang at one end (i.e., agents with one overhang and one blunt end) or with no nucleotide overhangs at either end. Most often such a molecule will be double-stranded over its entire length.

[0130] The term “antisense strand” or “guide strand” refers to the strand of an iRNA, e.g., a dsRNA, which includes a region that is substantially complementary to a target sequence, e.g., a CFB mRNA.

[0131] As used herein, the term “region of complementarity” refers to the region on the antisense strand that is substantially complementary to a sequence, for example a target sequence, e.g., a complement factor B nucleotide sequence, as defined herein. Where the region of complementarity is not fully complementary to the target sequence, the mismatches can be in the internal or terminal regions of the molecule. Generally, the most tolerated mismatches are in the terminal regions, e.g., within 5, 4, or 3 nucleotides of the 5′- or 3′-end of the iRNA. In some embodiments, a double stranded RNA agent of the invention includes a nucleotide mismatch in the antisense strand. In some embodiments, the antisense strand of the double stranded RNA agent of the invention includes no more than 4 mismatches with the target mRNA, e.g., the antisense strand includes 4, 3, 2, 1, or 0 mismatches with the target mRNA. In some embodiments, the antisense strand double stranded RNA agent of the invention includes no more than 4 mismatches with the sense strand, e.g., the antisense strand includes 4, 3, 2, 1, or 0 mismatches with the sense strand. In some embodiments, a double stranded RNA agent of the invention includes a nucleotide mismatch in the sense strand. In some embodiments, the sense strand of the double stranded RNA agent of the invention includes no more than 4 mismatches with the antisense strand, e.g., the sense strand includes 4, 3, 2, 1, or 0 mismatches with the antisense strand. In some embodiments, the nucleotide mismatch is, for example, within 5, 4, 3 nucleotides from the 3′-end of the iRNA. In another embodiment, the nucleotide mismatch is, for example, in the 3′-terminal nucleotide of the iRNA agent. In some embodiments, the mismatch(s) is not in the seed region.

[0132] Thus, an RNAi agent as described herein can contain one or more mismatches to the target sequence. In one embodiment, a RNAi agent as described herein contains no more than 3 mismatches (i.e., 3, 2, 1, or 0 mismatches). In one embodiment, an RNAi agent as described herein contains no more than 2 mismatches. In one embodiment, an RNAi agent as described herein contains no more than 1 mismatch. In one embodiment, an RNAi agent as described herein contains 0 mismatches. In certain embodiments, if the antisense strand of the RNAi agent contains mismatches to the target sequence, the mismatch can optionally be restricted to be within the last 5 nucleotides from either the 5′- or 3′-end of the region of complementarity. For example, in such embodiments, for a 23 nucleotide RNAi agent, the strand which is complementary to a region of a CFB gene, generally does not contain any mismatch within the central 13 nucleotides. The methods described herein or methods known in the art can be used to determine whether an RNAi agent containing a mismatch to a target sequence is effective in inhibiting the expression of a CFB gene. Consideration of the efficacy of RNAi agents with mismatches in inhibiting expression of a CFB gene is important, especially if the particular region of complementarity in a CFB gene is known to have polymorphic sequence variation within the population.

[0133] The term “sense strand” or “passenger strand” as used herein, refers to the strand of an iRNA that includes a region that is substantially complementary to a region of the antisense strand as that term is defined herein.

[0134] As used herein, “substantially all of the nucleotides are modified” are largely but not wholly modified and can include not more than 5, 4, 3, 2, or 1 unmodified nucleotides.

[0135] As used herein, the term “cleavage region” refers to a region that is located immediately adjacent to the cleavage site. The cleavage site is the site on the target at which cleavage occurs. In some embodiments, the cleavage region comprises three bases on either end of, and immediately adjacent to, the cleavage site. In some embodiments, the cleavage region comprises two bases on either end of, and immediately adjacent to, the cleavage site. In some embodiments, the cleavage site specifically occurs at the site bound by nucleotides 10 and 11 of the antisense strand, and the cleavage region comprises nucleotides 11, 12 and 13.

[0136] As used herein, and unless otherwise indicated, the term “complementary,” when used to describe a first nucleotide sequence in relation to a second nucleotide sequence, refers to the ability of an oligonucleotide or polynucleotide comprising the first nucleotide sequence to hybridize and form a duplex structure under certain conditions with an oligonucleotide or polynucleotide comprising the second nucleotide sequence, as will be understood by the skilled person. Such conditions can be, for example, “stringent conditions”, where stringent conditions can include: 400 mM NaCl, 40 mM PIPES pH 6.4, 1 mM EDTA, 50° C. or 70° C. for 12-16 hours followed by washing (see, e.g., “Molecular Cloning: A Laboratory Manual, Sambrook, et al. (1989) Cold Spring Harbor Laboratory Press). Other conditions, such as physiologically relevant conditions as can be encountered inside an organism, can apply. The skilled person will be able to determine the set of conditions most appropriate for a test of complementarity of two sequences in accordance with the ultimate application of the hybridized nucleotides.

[0137] Complementary sequences within an iRNA, e.g., within a dsRNA as described herein, include base-pairing of the oligonucleotide or polynucleotide comprising a first nucleotide sequence to an oligonucleotide or polynucleotide comprising a second nucleotide sequence over the entire length of one or both nucleotide sequences. Such sequences can be referred to as “fully complementary” with respect to each other herein. However, where a first sequence is referred to as “substantially complementary” with respect to a second sequence herein, the two sequences can be fully complementary, or they can form one or more, but generally not more than 5, 4, 3, or 2 mismatched base pairs upon hybridization for a duplex up to 30 base pairs, while retaining the ability to hybridize under the conditions most relevant to their ultimate application, e.g., inhibition of gene expression, in vitro or in vivo. However, where two oligonucleotides are designed to form, upon hybridization, one or more single stranded overhangs, such overhangs shall not be regarded as mismatches with regard to the determination of complementarity. For example, a dsRNA comprising one oligonucleotide 21 nucleotides in length and another oligonucleotide 23 nucleotides in length, wherein the longer oligonucleotide comprises a sequence of 21 nucleotides that is fully complementary to the shorter oligonucleotide, can yet be referred to as “fully complementary” for the purposes described herein.

[0138] “Complementary” sequences, as used herein, can also include, or be formed entirely from, non-Watson-Crick base pairs or base pairs formed from non-natural and modified nucleotides, in so far as the above requirements with respect to their ability to hybridize are fulfilled. Such non-Watson-Crick base pairs include, but are not limited to, G:U Wobble or Hoogsteen base pairing.

[0139] The terms “complementary,” “fully complementary” and “substantially complementary” herein can be used with respect to the base matching between the sense strand and the antisense strand of a dsRNA, or between two oligonucleotides or polynucleotides, such as the antisense strand of a double stranded RNA agent and a target sequence, as will be understood from the context of their use.

[0140] As used herein, a polynucleotide that is “substantially complementary to at least part of” a messenger RNA (mRNA) refers to a polynucleotide that is substantially complementary to a contiguous portion of the mRNA of interest (e.g., an mRNA encoding a complement factor B gene). For example, a polynucleotide is complementary to at least a part of a complement factor B mRNA if the sequence is substantially complementary to a non-interrupted portion of an mRNA encoding a complement factor B gene.

[0141] Accordingly, in some embodiments, the antisense polynucleotides disclosed herein are fully complementary to the target CFB sequence.

[0142] In other embodiments, the antisense polynucleotides disclosed herein are substantially complementary to the target CFB sequence and comprise a contiguous nucleotide sequence which is at least 80% complementary over its entire length to the equivalent region of the nucleotide sequence of any one of SEQ ID NOs:1, 3, 5, 7, 9, 11, 13, 15, 17, 19, 21, 23, 25, 27, 29, 31, 33 or 35, or a fragment of any one of SEQ ID NOs:1, 3, 5, 7, 9, 11, 13, 15, 17, 19, 21, 23, 25, 27, 29, 31, 33 or 35, such as about 85%, about 90%, about 91%, about 92%, about 93%, about 94%, about 95%, about 96%, about 97%, about 98%, or about 99% complementary.

[0143] In some embodiments, the antisense polynucleotides disclosed herein are substantially complementary to a fragment of a target CFB sequence and comprise a contiguous nucleotide sequence which is at least 80% complementary over its entire length to a fragment of SEQ ID NO: 1 selected from the group of nucleotides 943-965; 788-810; 734-756; 1016-1038; 1013-1035; 1207-1229; 1149-1171; 574-596; 1207-1229 or 828-850 of SEQ ID NO: 1, such as about 85%, about 90%, about 95%, or fully complementary.

[0144] In some embodiments, the antisense polynucleotides disclosed herein are substantially complementary to a fragment of a target CFB sequence and comprise a contiguous nucleotide sequence which is at least 80% complementary over its entire length to a fragment of SEQ ID NO: 1 selected from the group of nucleotides 153-175; 202-224; 219-241; 254-276; 304-326; 321-343; 347-369; 402-424; 418-440; 447-469; 491-513; 528-550; 549-571; 566-588; 591-613; 792-814; 819-841; 967-989; 1042-1064; 1234-1256; 1250-1272; 1269-1291; 1335-1357; 1354-1376; 1372-1394; 1422-1444; 1496-1518; 1670-1692; 1716-1738; 1757-1779; 1774-1796; 1793-1815; 1844-1866; 1871-1893; 1909-1931; 1924-1947; 1947-1969; 2161-2183; 2310-2332; 2330-2352; 2355-2377; 2494-2516; and 2527-2549 of SEQ ID NO: 1, such as about 85%, about 90%, about 95%, or fully complementary.

[0145] In other embodiments, the antisense polynucleotides disclosed herein are substantially complementary to the target CFB sequence and comprise a contiguous nucleotide sequence which is at least about 80% complementary over its entire length to any one of the sense strand nucleotide sequences in any one of any one of Tables 2-7, 13, 16, 19 and 20, or a fragment of any one of the sense strand nucleotide sequences in any one of Tables 2-7, 13, 16, 19 and 20, such as about 85%, about 90%, about 95%, or fully complementary.

[0146] In one embodiment, an RNAi agent of the disclosure includes a sense strand that is substantially complementary to an antisense polynucleotide which, in turn, is the same as a target CFB sequence, and wherein the sense strand polynucleotide comprises a contiguous nucleotide sequence which is at least about 80% complementary over its entire length to the equivalent region of the nucleotide sequence of SEQ ID NOs: 2, 4, 6, 8, 10, 12, 14, 16, 18, 20, 22, 24, 26, 28, 30, 32, 34 or 36, or a fragment of any one of SEQ ID NOs:2, 4, 6, 8, 10, 12, 14, 16, 18, 20, 22, 24, 26, 28, 30, 32, 34 or 36, such as about 85%, about 90%, about 95%, or fully complementary.

[0147] In some embodiments, an iRNA of the invention includes a sense strand that is substantially complementary to an antisense polynucleotide which, in turn, is complementary to a target complement factor B sequence, and wherein the sense strand polynucleotide comprises a contiguous nucleotide sequence which is at least about 80% complementary over its entire length to any one of the antisense strand nucleotide sequences in any one of any one of Tables 2-7, 13, 16, 19 and 20, or a fragment of any one of the antisense strand nucleotide sequences in any one of Tables 2-7, 13, 16, 19 and 20, such as about 85%, about 90%, about 95%, or fully complementary. In certain embodiments, the sense and antisense strands are selected from any one of the chemically modified duplexes AD-560018, AD-559375, AD-559160, AD-559374, AD-559060, AD-559721, AD-559026, AD-558225, AD-557069, AD-558068, AD-557422, AD-558063, AD-558066, AD-556701, AD-558657, AD-559020, AD-559023, AD-558860, AD-560019, AD-560016, AD-559008, AD-559717, AD-557072, AD-558097, AD-557774, AD-557070, AD-558065, AD-557853, AD-557079.

[0148] In certain embodiments, the sense and antisense strands are selected from any one of the chemically modified duplexes AD-560132.1; AD-560099.1; AD-559998.1; AD-559993.1; AD-559973.1; AD-559882.1; AD-559706.1; AD-559704.1; AD-559688.1; AD-559668.1; AD-559641.1; AD-559609.1; AD-559590.1; AD-559573.1; AD-559532.1; AD-559486.1; AD-559330.1; AD-559274.1; AD-559226.1; AD-559208.1; AD-559189.1; AD-559124.1; AD-559105.1; AD-559089.1; AD-558935.1; AD-558879.1; AD-558777.1; AD-558750.1; AD-558637.1; AD-558612.1; AD-558595.1; AD-558574.1; AD-558555.1; AD-558511.1; AD-558482.1; AD-558466.1; AD-558450.1; AD-558424.1; AD-558407.1; AD-558393.1; AD-558378.1; AD-558361.1; AD-558312.1 In some embodiments, the double-stranded region of a double-stranded iRNA agent is equal to or at least, 17, 18, 19, 20, 21, 22, 23, 23, 24, 25, 26, 27, 28, 29, 30 or more nucleotide pairs in length.

[0149] In some embodiments, the antisense strand of a double-stranded iRNA agent is equal to or at least 17, 18, 19, 20, 21, 22, 23, 23, 24, 25, 26, 27, 28, 29, or 30 nucleotides in length.

[0150] In some embodiments, the sense strand of a double-stranded iRNA agent is equal to or at least 17, 18, 19, 20, 21, 22, 23, 23, 24, 25, 26, 27, 28, 29, or 30 nucleotides in length.

[0151] In one embodiment, the sense and antisense strands of the double-stranded iRNA agent are each 18 to 30 nucleotides in length.

[0152] In one embodiment, the sense and antisense strands of the double-stranded iRNA agent are each 19 to 25 nucleotides in length.

[0153] In one embodiment, the sense and antisense strands of the double-stranded iRNA agent are each 21 to 23 nucleotides in length.

[0154] In one embodiment, the sense strand of the iRNA agent is 21-nucleotides in length, and the antisense strand is 23-nucleotides in length, wherein the strands form a double-stranded region of 21 consecutive base pairs having a 2-nucleotide long single stranded overhangs at the 3-end.

[0155] In some embodiments, the majority of nucleotides of each strand are ribonucleotides, but as described in detail herein, each or both strands can also include one or more non-ribonucleotides, e.g., a deoxyribonucleotide or a modified nucleotide. In addition, an “iRNA” may include ribonucleotides with chemical modifications. Such modifications may include all types of modifications disclosed herein or known in the art. Any such modifications, as used in an iRNA molecule, are encompassed by “iRNA” for the purposes of this specification and claims.

[0156] In certain embodiments of the instant disclosure, inclusion of a deoxy-nucleotide if present within an RNAi agent can be considered to constitute a modified nucleotide.

[0157] In one embodiment, at least partial suppression of the expression of a CFB gene, is assessed by a reduction of the amount of CFB mRNA which can be isolated from or detected in a first cell or group of cells in which a CFB gene is transcribed and which has or have been treated such that the expression of a CFB gene is inhibited, as compared to a second cell or group of cells substantially identical to the first cell or group of cells but which has or have not been so treated (control cells). The degree of inhibition may be expressed in terms of:

$$\frac{( mRNA in control cells ) - ( mRNA in treated cells )}{( mRNA in control cells )} •100 \%$$

[0158] The phrase “contacting a cell with an iRNA,” such as a dsRNA, as used herein, includes contacting a cell by any possible means. Contacting a cell with an iRNA includes contacting a cell in vitro with the iRNA or contacting a cell in vivo with the iRNA. The contacting may be done directly or indirectly. Thus, for example, the iRNA may be put into physical contact with the cell by the individual performing the method, or alternatively, the iRNA may be put into a situation that will permit or cause it to subsequently come into contact with the cell.

[0159] Contacting a cell in vitro may be done, for example, by incubating the cell with the iRNA. Contacting a cell in vivo may be done, for example, by injecting the iRNA into or near the tissue where the cell is located, or by injecting the iRNA into another area, e.g., the bloodstream or the subcutaneous space, such that the agent will subsequently reach the tissue where the cell to be contacted is located. For example, the iRNA may contain or be coupled to a ligand, e.g., GalNAc, that directs the iRNA to a site of interest, e.g., the liver. Combinations of in vitro and in vivo methods of contacting are also possible. For example, a cell may also be contacted in vitro with an iRNA and subsequently transplanted into a subject.

[0160] In certain embodiments, contacting a cell with an iRNA includes “introducing” or “delivering the iRNA into the cell” by facilitating or effecting uptake or absorption into the cell. Absorption or uptake of an iRNA can occur through unaided diffusion or active cellular processes, or by auxiliary agents or devices. Introducing an iRNA into a cell may be in vitro or in vivo. For example, for in vivo introduction, iRNA can be injected into a tissue site or administered systemically. In vitro introduction into a cell includes methods known in the art such as electroporation and lipofection. Further approaches are described herein below or are known in the art.

[0161] The term “lipid nanoparticle” or “LNP” is a vesicle comprising a lipid layer encapsulating a pharmaceutically active molecule, such as a nucleic acid molecule, e.g., an iRNA or a plasmid from which an iRNA is transcribed. LNPs are described in, for example, U.S. Pat. Nos. 6,858,225, 6,815,432, 8,158,601, and 8,058,069, the entire contents of which are hereby incorporated herein by reference.

[0162] As used herein, a “subject” is an animal, such as a mammal, including a primate (such as a human, a non-human primate, e.g., a monkey, and a chimpanzee), a non-primate (such as a rabbit, a sheep, a hamster, a guinea pig, a dog, a rat, or a mouse), or a bird that expresses the target gene, either endogenously or heterologously. In an embodiment, the subject is a human, such as a human being treated or assessed for a disease or disorder that would benefit from reduction in CFB expression; a human at risk for a disease or disorder that would benefit from reduction in CFB expression; a human having a disease or disorder that would benefit from reduction in CFB expression; or human being treated for a disease or disorder that would benefit from reduction in CFB expression as described herein. In some embodiments, the subject is a female human. In other embodiments, the subject is a male human. In one embodiment, the subject is an adult subject. In another embodiment, the subject is a pediatric subject.

[0163] As used herein, the terms “treating” or “treatment” refer to a beneficial or desired result, such as reducing at least one sign or symptom of a CFB-associated disorder in a subject. Treatment also includes a reduction of one or more sign or symptoms associated with unwanted CFB expression; diminishing the extent of unwanted CFB activation or stabilization; amelioration or palliation of unwanted CFB activation or stabilization. “Treatment” can also mean prolonging survival as compared to expected survival in the absence of treatment.

[0164] The term “lower” in the context of the level of CFB in a subject or a disease marker or symptom refers to a statistically significant decrease in such level. The decrease can be, for example, at least 10%, 15%, 20%, 25%, 30%, %, 40%, 45%, 50%, 55%, 60%, 65%, 70%, 75%, 80%, 85%, 90%, 95%, or more. In certain embodiments, a decrease is at least 20%. In certain embodiments, the decrease is at least 50% in a disease marker, e.g., protein or gene expression level. “Lower” in the context of the level of CFB in a subject is a decrease to a level accepted as within the range of normal for an individual without such disorder. In certain embodiments, the expression of the target is normalized, i.e., decreased towards or to a level accepted as within the range of normal for an individual without such disorder, e.g., normalization of body weight, blood pressure, or a serum lipid level. As used here, “lower” in a subject can refer to lowering of gene expression or protein production in a cell in a subject does not require lowering of expression in all cells or tissues of a subject. For example, as used herein, lowering in a subject can include lowering of gene expression or protein production in the liver of a subject.

[0165] The term “lower” can also be used in association with normalizing a symptom of a disease or condition, i.e. decreasing the difference between a level in a subject suffering from a CFB-associated disease towards or to a level in a normal subject not suffering from a CFB-associated disease. For example, if a subject with a normal weight of 70 kg weighs 90 kg prior to treatment (20 kg overweight) and 80 kg after treatment (10 kg overweight), the subject's weight is lowered towards a normal weight by 50% (10/20×100%). Similarly, if the HDL level of a woman is increased from 50 mg/dL (poor) to 57 mg/dL, with a normal level being 60 mg/dL, the difference between the prior level of the subject and the normal level is decreased by 70% (difference of 10 mg/dL between subject level and normal is decreased by 7 mg/dL, 7/10×100%). As used herein, if a disease is associated with an elevated value for a symptom, “normal” is considered to be the upper limit of normal. If a disease is associated with a decreased value for a symptom, “normal” is considered to be the lower limit of normal.

[0166] As used herein, “prevention” or “preventing,” when used in reference to a disease, disorder or condition thereof, that would benefit from a reduction in expression of a CFB gene or production of CFB protein, refers to preventing a subject who has at least one sign or symptom of a disease from developing further signs and symptoms thereby meeting the diagnostic criteria for that disease. In certain embodiments, prevention includes delayed progression to meeting the diagnostic criteria of the disease by days, weeks, months or years as compared to what would be predicted by natural history studies or the typical progression of the disease.

[0167] As used herein, the term “complement factor B disease” or “CFB-associated disease,” is a disease or disorder that is caused by, or associated with, complement activation. The term “CFB-associated disease” includes a disease, disorder or condition that would benefit from a decrease in CFB gene expression, replication, or protein activity. Non-limiting examples of CFB-associated diseases include, for example, paroxysmal nocturnal hemoglobinuria (PNH), atypical hemolytic uremic syndrome (aHUS), asthma, rheumatoid arthritis (RA); antiphospholipid antibody syndrome; lupus nephritis; ischemia-reperfusion injury; typical or infectious hemolytic uremic syndrome (tHUS); dense deposit disease (DDD); neuromyelitis optica (NMO); multifocal motor neuropathy (MMN); multiple sclerosis (MS); macular degeneration (e.g., age-related macular degeneration (AMD)); hemolysis, elevated liver enzymes, and low platelets (HELLP) syndrome; thrombotic thrombocytopenic purpura (TTP); spontaneous fetal loss; Pauci-immune vasculitis; epidermolysis bullosa; recurrent fetal loss; pre-eclampsia, traumatic brain injury, myasthenia gravis, cold agglutinin disease, dermatomyositis bullous pemphigoid, Shiga toxin E. coli-related hemolytic uremic syndrome, C3 neuropathy, anti-neutrophil cytoplasmic antibody-associated vasculitis (e.g., granulomatosis with polyangiitis (previously known as Wegener granulomatosis), Churg-Strauss syndrome, and microscopic polyangiitis), humoral and vascular transplant rejection, graft dysfunction, myocardial infarction (e.g., tissue damage and ischemia in myocardial infarction), an allogenic transplant, sepsis (e.g., poor outcome in sepsis), Coronary artery disease, dermatomyositis, Graves' disease, atherosclerosis, Alzheimer's disease, systemic inflammatory response sepsis, septic shock, spinal cord injury, glomerulonephritis, Hashimoto's thyroiditis, type I diabetes, psoriasis, pemphigus, autoimmune hemolytic anemia (AIHA), ITP, Goodpasture syndrome, Degos disease, antiphospholipid syndrome (APS), catastrophic APS (CAPS), a cardiovascular disorder, myocarditis, a cerebrovascular disorder, a peripheral (e.g., musculoskeletal) vascular disorder, a renovascular disorder, a mesenteric/enteric vascular disorder, vasculitis, Henoch-Schönlein purpura nephritis, systemic lupus erythematosus-associated vasculitis, vasculitis associated with rheumatoid arthritis, immune complex vasculitis, Takayasu's disease, dilated cardiomyopathy, diabetic angiopathy, Kawasaki's disease (arteritis), venous gas embolus (VGE), and restenosis following stent placement, rotational atherectomy, and percutaneous transluminal coronary angioplasty (PTCA) (see, e.g., Holers (2008) Immunological Reviews 223:300-316; Holers and Thurman (2004) Molecular Immunology 41:147-152; U.S. Patent Publication No. 20070172483).

[0168] In one embodiment, the complement factor B-associate disease is selected from the group consisting of C3 glomerulopathy, systemic lupus erythematosus (SLE), e.g., Lupus Nephritis, IgA nephropathy, diabetic nephropathy, polycystic kidney disease, membranous nephropathy, age-related macular degeneration, atypical hemolytic uremic syndrome, thrombotic microangiopathy, myasthenia gravis, ischemia and reperfusion injury, paroxysmal nocturnal hemoglobinuria, and rheumatoid arthritis

[0169] In another embodiment, the complement factor B-associate disease is selected from the group consisting of C3 glomerulopathy, systemic lupus erythematosus (SLE), e.g., Lupus Nephritis, IgA nephropathy, diabetic nephropathy, and polycystic kidney disease.

[0170] Further details regarding signs and symptoms of the various diseases or conditions are provided herein and are well known in the art.

[0171] “Therapeutically effective amount,” as used herein, is intended to include the amount of an RNAi agent that, when administered to a subject having a CFB-associated disease, is sufficient to effect treatment of the disease (e.g., by diminishing, ameliorating, or maintaining the existing disease or one or more symptoms of disease). The “therapeutically effective amount” may vary depending on the RNAi agent, how the agent is administered, the disease and its severity and the history, age, weight, family history, genetic makeup, the types of preceding or concomitant treatments, if any, and other individual characteristics of the subject to be treated.

[0172] “Prophylactically effective amount,” as used herein, is intended to include the amount of an RNAi agent that, when administered to a subject having at least one sign or symptom of a CFB-associated disorder, is sufficient to prevent or delay the subject's progression to meeting the full diagnostic criteria of the disease. Prevention of the disease includes slowing the course of progression to full blown disease. The “prophylactically effective amount” may vary depending on the RNAi agent, how the agent is administered, the degree of risk of disease, and the history, age, weight, family history, genetic makeup, the types of preceding or concomitant treatments, if any, and other individual characteristics of the patient to be treated.

[0173] A “therapeutically-effective amount” or “prophylactically effective amount” also includes an amount of an RNAi agent that produces some desired effect at a reasonable benefit/risk ratio applicable to any treatment. The iRNA employed in the methods of the present invention may be administered in a sufficient amount to produce a reasonable benefit/risk ratio applicable to such treatment.

[0174] The phrase “pharmaceutically acceptable” is employed herein to refer to those compounds, materials, compositions, or dosage forms which are, within the scope of sound medical judgment, suitable for use in contact with the tissues of human subjects and animal subjects without excessive toxicity, irritation, allergic response, or other problem or complication, commensurate with a reasonable benefit/risk ratio.

[0175] The phrase “pharmaceutically-acceptable carrier” as used herein means a pharmaceutically-acceptable material, composition, or vehicle, such as a liquid or solid filler, diluent, excipient, manufacturing aid (e.g., lubricant, talc magnesium, calcium or zinc stearate, or steric acid), or solvent encapsulating material, involved in carrying or transporting the subject compound from one organ, or portion of the body, to another organ, or portion of the body. Each carrier must be “acceptable” in the sense of being compatible with the other ingredients of the formulation and not injurious to the subject being treated. Such carriers are known in the art. Pharmaceutically acceptable carriers include carriers for administration by injection.

[0176] The term “sample,” as used herein, includes a collection of similar fluids, cells, or tissues isolated from a subject, as well as fluids, cells, or tissues present within a subject. Examples of biological fluids include blood, serum and serosal fluids, plasma, cerebrospinal fluid, ocular fluids, lymph, urine, saliva, and the like. Tissue samples may include samples from tissues, organs, or localized regions. For example, samples may be derived from particular organs, parts of organs, or fluids or cells within those organs. In certain embodiments, samples may be derived from the liver (e.g., whole liver or certain segments of liver or certain types of cells in the liver, such as, e.g., hepatocytes). In some embodiments, a “sample derived from a subject” refers to urine obtained from the subject. A “sample derived from a subject” can refer to blood or blood derived serum or plasma from the subject.

### II. iRNAs of the Invention

[0177] The present invention provides iRNAs which inhibit the expression of a complement factor B gene. In certain embodiments, the iRNA includes double stranded ribonucleic acid (dsRNA) molecules for inhibiting the expression of a CFB gene in a cell, such as a cell within a subject, e.g., a mammal, such as a human susceptible to developing a complement factor B-associated disorder. The dsRNAi agent includes an antisense strand having a region of complementarity which is complementary to at least a part of an mRNA formed in the expression of a CFB gene. The region of complementarity is about 19-30 nucleotides in length (e.g., about 30, 29, 28, 27, 26, 25, 24, 23, 22, 21, 20, or 19 nucleotides in length). Upon contact with a cell expressing the CFB gene, the iRNA inhibits the expression of the CFB gene (e.g., a human, a primate, a non-primate, or a rat CFB gene) by at least about 50% as assayed by, for example, a PCR or branched DNA (bDNA)-based method, or by a protein-based method, such as by immunofluorescence analysis, using, for example, western blotting or flow cytometric techniques. In certain embodiments, inhibition of expression is determined by the qPCR method provided in the examples herein with the siRNA at, e.g., a 10 nM concentration, in an appropriate organism cell line provided therein. In certain embodiments, inhibition of expression in vivo is determined by knockdown of the human gene in a rodent expressing the human gene, e.g., a mouse or an AAV-infected mouse expressing the human target gene, e.g., when administered as single dose, e.g., at 3 mg/kg at the nadir of RNA expression.

[0178] A dsRNA includes two RNA strands that are complementary and hybridize to form a duplex structure under conditions in which the dsRNA will be used. One strand of a dsRNA (the antisense strand) includes a region of complementarity that is substantially complementary, and generally fully complementary, to a target sequence. The target sequence can be derived from the sequence of an mRNA formed during the expression of a CFB gene. The other strand (the sense strand) includes a region that is complementary to the antisense strand, such that the two strands hybridize and form a duplex structure when combined under suitable conditions. As described elsewhere herein and as known in the art, the complementary sequences of a dsRNA can also be contained as self-complementary regions of a single nucleic acid molecule, as opposed to being on separate oligonucleotides.

[0179] Generally, the duplex structure is 15 to 30 base pairs in length, e.g., 15-29, 15-28, 15-27, 15-26, 15-25, 15-24, 15-23, 15-22, 15-21, 15-20, 15-19, 15-18, 15-17, 18-30, 18-29, 18-28, 18-27, 18-26, 18-25, 18-24, 18-23, 18-22, 18-21, 18-20, 19-30, 19-29, 19-28, 19-27, 19-26, 19-25, 19-24, 19-23, 19-22, 19-21, 19-20, 20-30, 20-29, 20-28, 20-27, 20-26, 20-25, 20-24, 20-23, 20-22, 20-21, 21-30, 21-29, 21-28, 21-27, 21-26, 21-25, 21-24, 21-23, or 21-22 base pairs in length. In certain embodiments, the duplex structure is 18 to 25 base pairs in length, e.g., 18-25, 18-24, 18-23, 18-22, 18-21, 18-20, 19-25, 19-24, 19-23, 19-22, 19-21, 19-20, 20-25, 20-24, 20-23, 20-22, 20-21, 21-25, 21-24, 21-23, 21-22, 22-25, 22-24, 22-23, 23-25, 23-24 or 24-25 base pairs in length, for example, 19-21 basepairs in length. Ranges and lengths intermediate to the above recited ranges and lengths are also contemplated to be part of the disclosure.

[0180] Similarly, the region of complementarity to the target sequence is 15 to 30 nucleotides in length, e.g., 15-29, 15-28, 15-27, 15-26, 15-25, 15-24, 15-23, 15-22, 15-21, 15-20, 15-19, 15-18, 15-17, 18-30, 18-29, 18-28, 18-27, 18-26, 18-25, 18-24, 18-23, 18-22, 18-21, 18-20, 19-30, 19-29, 19-28, 19-27, 19-26, 19-25, 19-24, 19-23, 19-22, 19-21, 19-20, 20-30, 20-29, 20-28, 20-27, 20-26, 20-25, 20-24,20-23, 20-22, 20-21, 21-30, 21-29, 21-28, 21-27, 21-26, 21-25, 21-24, 21-23, or 21-22 nucleotides in length, for example 19-23 nucleotides in length or 21-23 nucleotides in length. Ranges and lengths intermediate to the above recited ranges and lengths are also contemplated to be part of the disclosure.

[0181] In some embodiments, the duplex structure is 19 to 30 base pairs in length. Similarly, the region of complementarity to the target sequence is 19 to 30 nucleotides in length.

[0182] In some embodiments, the dsRNA is about 19 to about 23 nucleotides in length, or about 25 to about 30 nucleotides in length. In general, the dsRNA is long enough to serve as a substrate for the Dicer enzyme. For example, it is well-known in the art that dsRNAs longer than about 21-23 nucleotides in length may serve as substrates for Dicer. As the ordinarily skilled person will also recognize, the region of an RNA targeted for cleavage will most often be part of a larger RNA molecule, often an mRNA molecule. Where relevant, a “part” of an mRNA target is a contiguous sequence of an mRNA target of sufficient length to allow it to be a substrate for RNAi-directed cleavage (i.e., cleavage through a RISC pathway).

[0183] One of skill in the art will also recognize that the duplex region is a primary functional portion of a dsRNA, e.g., a duplex region of about 19 to about 30 base pairs, e.g., about 19-30, 19-29, 19-28, 19-27, 19-26, 19-25, 19-24, 19-23, 19-22, 19-21, 19-20, 20-30, 20-29, 20-28, 20-27, 20-26, 20-25, 20-24, 20-23, 20-22, 20-21, 21-30, 21-29, 21-28, 21-27, 21-26, 21-25, 21-24, 21-23, or 21-22 base pairs. Thus, in one embodiment, to the extent that it becomes processed to a functional duplex, of e.g., 15-30 base pairs, that targets a desired RNA for cleavage, an RNA molecule or complex of RNA molecules having a duplex region greater than 30 base pairs is a dsRNA. Thus, an ordinarily skilled artisan will recognize that in one embodiment, a miRNA is a dsRNA. In another embodiment, a dsRNA is not a naturally occurring miRNA. In another embodiment, an iRNA agent useful to target complement factor B gene expression is not generated in the target cell by cleavage of a larger dsRNA.

[0184] A dsRNA as described herein can further include one or more single-stranded nucleotide overhangs e.g., 1-4, 2-4, 1-3, 2-3, 1, 2, 3, or 4 nucleotides. dsRNAs having at least one nucleotide overhang can have superior inhibitory properties relative to their blunt-ended counterparts. A nucleotide overhang can comprise or consist of a nucleotide/nucleoside analog, including a deoxynucleotide/nucleoside. The overhang(s) can be on the sense strand, the antisense strand, or any combination thereof. Furthermore, the nucleotide(s) of an overhang can be present on the 5′-end, 3′-end, or both ends of an antisense or sense strand of a dsRNA.

[0185] A dsRNA can be synthesized by standard methods known in the art. Double stranded RNAi compounds of the invention may be prepared using a two-step procedure. First, the individual strands of the double stranded RNA molecule are prepared separately. Then, the component strands are annealed. The individual strands of the siRNA compound can be prepared using solution-phase or solid-phase organic synthesis or both. Organic synthesis offers the advantage that the oligonucleotide strands comprising unnatural or modified nucleotides can be easily prepared. Similarly, single-stranded oligonucleotides of the invention can be prepared using solution-phase or solid-phase organic synthesis or both.

[0186] Regardless of the method of synthesis, the siRNA preparation can be prepared in a solution (e.g., an aqueous or organic solution) that is appropriate for formulation. For example, the siRNA preparation can be precipitated and redissolved in pure double-distilled water, and lyophilized. The dried siRNA can then be resuspended in a solution appropriate for the intended formulation process.

[0187] In an aspect, a dsRNA of the invention includes at least two nucleotide sequences, a sense sequence and an anti-sense sequence. The sense strand is selected from the group of sequences provided in any one of Tables 2-7, 13, 16, 19 and 20, and the corresponding antisense strand of the sense strand is selected from the group of sequences of any one of Tables 2-7, 13, 16, 19 and 20. In this aspect, one of the two sequences is complementary to the other of the two sequences, with one of the sequences being substantially complementary to a sequence of an mRNA generated in the expression of a complement factor B gene. As such, in this aspect, a dsRNA will include two oligonucleotides, where one oligonucleotide is described as the sense strand in any one of Tables 2-7, 13, 16, 19 and 20, and the second oligonucleotide is described as the corresponding antisense strand of the sense strand in any one of Tables 2-7, 13, 16, 19 and 20.

[0188] In certain embodiments, the substantially complementary sequences of the dsRNA are contained on separate oligonucleotides. In other embodiments, the substantially complementary sequences of the dsRNA are contained on a single oligonucleotide.

[0189] In certain embodiments, the sense or antisense strand is selected from the sense or antisense strand of any one of duplexes AD-560018, AD-559375, AD-559160, AD-559374, AD-559060, AD-559721, AD-559026, AD-558225, AD-557069, AD-558068, AD-557422, AD-558063, AD-558066, AD-556701, AD-558657, AD-559020, AD-559023, AD-558860, AD-560019, AD-560016, AD-559008, AD-559717, AD-557072, AD-558097, AD-557774, AD-557070, AD-558065, AD-557853, or AD-557079.

[0190] It will be understood that, although the sequences in Tables 2, 4, 6 and 19 are not described as modified or conjugated sequences, the RNA of the iRNA of the invention e.g., a dsRNA of the invention, may comprise any one of the sequences set forth in any one of Tables 2-7, 13, 16, 19 and 20 that is un-modified, un-conjugated, or modified or conjugated differently than described therein. In other words, the invention encompasses dsRNA of Tables 2-7, 13, 16, 19 and 20 which are un-modified, un-conjugated, modified, or conjugated, as described herein.

[0191] The skilled person is well aware that dsRNAs having a duplex structure of about 20 to 23 base pairs, e.g., 21, base pairs have been hailed as particularly effective in inducing RNA interference (Elbashir et al., EMBO 2001, 20:6877-6888). However, others have found that shorter or longer RNA duplex structures can also be effective (Chu and Rana (2007) RNA 14:1714-1719; Kim et al. (2005) Nat Biotech 23:222-226). In the embodiments described above, by virtue of the nature of the oligonucleotide sequences provided in any one of Tables 2-7, 13, 16, 19 and 20, dsRNAs described herein can include at least one strand of a length of minimally 21 nucleotides. It can be reasonably expected that shorter duplexes having any one of the sequences in any one of Tables 2-7, 13, 16, 19 and 20 minus only a few nucleotides on one or both ends can be similarly effective as compared to the dsRNAs described above. Hence, dsRNAs having a sequence of at least 19, 20, or more contiguous nucleotides derived from any one of the sequences of any one of Tables 2-7, 13, 16, 19 and 20, and differing in their ability to inhibit the expression of a complement factor B gene by not more than about 5, 10, 15, 20, 25, or 30% inhibition from a dsRNA comprising the full sequence, are contemplated to be within the scope of the present invention.

[0192] In addition, the RNAs provided in Tables 2-7, 13, 16, 19 and 20 identify a site(s) in a complement factor B transcript that is susceptible to RISC-mediated cleavage. As such, the present invention further features iRNAs that target within one of these sites. As used herein, an iRNA is said to target within a particular site of an RNA transcript if the iRNA promotes cleavage of the transcript anywhere within that particular site. Such an iRNA will generally include at least about 19 contiguous nucleotides from any one of the sequences provided in any one of Tables 2-7, 13, 16, 19 and 20 coupled to additional nucleotide sequences taken from the region contiguous to the selected sequence in a complement factor B gene.

[0193] An RNAi agent as described herein can contain one or more mismatches to the target sequence. In one embodiment, an RNAi agent as described herein contains no more than 3 mismatches (i.e., 3, 2, 1, or 0 mismatches). In one embodiment, an RNAi agent as described herein contains no more than 2 mismatches. In one embodiment, an RNAi agent as described herein contains no more than 1 mismatch. In one embodiment, an RNAi agent as described herein contains 0 mismatches. In certain embodiments, if the antisense strand of the RNAi agent contains mismatches to the target sequence, the mismatch can optionally be restricted to be within the last 5 nucleotides from either the 5′- or 3′-end of the region of complementarity. For example, in such embodiments, for a 23 nucleotide RNAi agent, the strand which is complementary to a region of a CFB gene generally does not contain any mismatch within the central 13 nucleotides. The methods described herein or methods known in the art can be used to determine whether an RNAi agent containing a mismatch to a target sequence is effective in inhibiting the expression of a CFB gene. Consideration of the efficacy of RNAi agents with mismatches in inhibiting expression of a CFB gene is important, especially if the particular region of complementarity in a CFB gene is known to have polymorphic sequence variation within the population.

### III. Modified iRNAs of the Invention

[0194] In certain embodiments, the RNA of the iRNA of the invention e.g., a dsRNA, is un-modified, and does not comprise, e.g., chemical modifications or conjugations known in the art and described herein. In other embodiments, the RNA of an iRNA of the invention, e.g., a dsRNA, is chemically modified to enhance stability or other beneficial characteristics. In certain embodiments of the invention, substantially all of the nucleotides of an iRNA of the invention are modified. In other embodiments of the invention, all of the nucleotides of an iRNA or substantially all of the nucleotides of an iRNA are modified, i.e., not more than 5, 4, 3, 2, or 1 unmodified nucleotides are present in a strand of the iRNA.

[0195] The nucleic acids featured in the invention can be synthesized or modified by methods well established in the art, such as those described in “Current protocols in nucleic acid chemistry,” Beaucage, S. L. et al. (Edrs.), John Wiley & Sons, Inc., New York, NY, USA, which is hereby incorporated herein by reference. Modifications include, for example, end modifications, e.g., 5′-end modifications (phosphorylation, conjugation, inverted linkages) or 3′-end modifications (conjugation, DNA nucleotides, inverted linkages, etc.); base modifications, e.g., replacement with stabilizing bases, destabilizing bases, or bases that base pair with an expanded repertoire of partners, removal of bases (abasic nucleotides), or conjugated bases; sugar modifications (e.g., at the 2′-position or 4′-position) or replacement of the sugar; or backbone modifications, including modification or replacement of the phosphodiester linkages. Specific examples of iRNA compounds useful in the embodiments described herein include, but are not limited to RNAs containing modified backbones or no natural internucleoside linkages. RNAs having modified backbones include, among others, those that do not have a phosphorus atom in the backbone. For the purposes of this specification, and as sometimes referenced in the art, modified RNAs that do not have a phosphorus atom in their internucleoside backbone can also be considered to be oligonucleosides. In some embodiments, a modified iRNA will have a phosphorus atom in its internucleoside backbone.

[0196] Modified RNA backbones include, for example, phosphorothioates, chiral phosphorothioates, phosphorodithioates, phosphotriesters, aminoalkylphosphotriesters, methyl and other alkyl phosphonates including 3′-alkylene phosphonates and chiral phosphonates, phosphinates, phosphoramidates including 3′-amino phosphoramidate and aminoalkylphosphoramidates, thionophosphoramidates, thionoalkylphosphonates, thionoalkylphosphotriesters, and boranophosphates having normal 3′-5′ linkages, 2′-5′-linked analogs of these, and those having inverted polarity wherein the adjacent pairs of nucleoside units are linked 3′-5′ to 5′-3′ or 2′-5′ to 5′-2′. Various salts, mixed salts and free acid forms are also included. In some embodiments of the invention, the dsRNA agents of the invention are in a free acid form. In other embodiments of the invention, the dsRNA agents of the invention are in a salt form. In one embodiment, the dsRNA agents of the invention are in a sodium salt form. In certain embodiments, when the dsRNA agents of the invention are in the sodium salt form, sodium ions are present in the agent as counterions for substantially all of the phosphodiester or phosphorothiotate groups present in the agent. Agents in which substantially all of the phosphodiester or phosphorothioate linkages have a sodium counterion include not more than 5, 4, 3, 2, or 1 phosphodiester or phosphorothioate linkages without a sodium counterion. In some embodiments, when the dsRNA agents of the invention are in the sodium salt form, sodium ions are present in the agent as counterions for all of the phosphodiester or phosphorothiotate groups present in the agent.

[0197] Representative U.S. patents that teach the preparation of the above phosphorus-containing linkages include, but are not limited to, U.S. Pat. Nos. 3,687,808; 4,469,863; 4,476,301; 5,023,243; 5,177,195; 5,188,897; 5,264,423; 5,276,019; 5,278,302; 5,286,717; 5,321,131; 5,399,676; 5,405,939; 5,453,496; 5,455,233; 5,466,677; 5,476,925; 5,519,126; 5,536,821; 5,541,316; 5,550,111; 5,563,253; 5,571,799; 5,587,361; 5,625,050; 6,028,188; 6,124,445; 6,160,109; 6,169,170; 6,172,209; 6,239,265; 6,277,603; 6,326,199; 6,346,614; 6,444,423; 6,531,590; 6,534,639; 6,608,035; 6,683,167; 6,858,715; 6,867,294; 6,878,805; 7,015,315; 7,041,816; 7,273,933; 7,321,029; and U.S. Pat. No. RE39,464, the entire contents of each of which are hereby incorporated herein by reference.

[0198] Modified RNA backbones that do not include a phosphorus atom therein have backbones that are formed by short chain alkyl or cycloalkyl internucleoside linkages, mixed heteroatoms and alkyl or cycloalkyl internucleoside linkages, or one or more short chain heteroatomic or heterocyclic internucleoside linkages. These include those having morpholino linkages (formed in part from the sugar portion of a nucleoside); siloxane backbones; sulfide, sulfoxide and sulfone backbones; formacetyl and thioformacetyl backbones; methylene formacetyl and thioformacetyl backbones; alkene containing backbones; sulfamate backbones; methyleneimino and methylenehydrazino backbones; sulfonate and sulfonamide backbones; amide backbones; and others having mixed N, O, S, and CH₂ component parts.

[0199] Representative U.S. patents that teach the preparation of the above oligonucleosides include, but are not limited to, U.S. Pat. Nos. 5,034,506; 5,166,315; 5,185,444; 5,214,134; 5,216,141; 5,235,033; 5,64,562; 5,264,564; 5,405,938; 5,434,257; 5,466,677; 5,470,967; 5,489,677; 5,541,307; 5,561,225; 5,596,086; 5,602,240; 5,608,046; 5,610,289; 5,618,704; 5,623,070; 5,663,312; 5,633,360; 5,677,437; and 5,677,439, the entire contents of each of which are hereby incorporated herein by reference.

[0200] Suitable RNA mimetics are contemplated for use in iRNAs provided herein, in which both the sugar and the internucleoside linkage, i.e., the backbone, of the nucleotide units are replaced with novel groups. The base units are maintained for hybridization with an appropriate nucleic acid target compound. One such oligomeric compound in which an RNA mimetic that has been shown to have excellent hybridization properties is referred to as a peptide nucleic acid (PNA). In PNA compounds, the sugar backbone of an RNA is replaced with an amide containing backbone, in particular an aminoethylglycine backbone. The nucleobases are retained and are bound directly or indirectly to aza nitrogen atoms of the amide portion of the backbone. Representative US patents that teach the preparation of PNA compounds include, but are not limited to, U.S. Pat. Nos. 5,539,082; 5,714,331; and 5,719,262, the entire contents of each of which are hereby incorporated herein by reference. Additional PNA compounds suitable for use in the iRNAs of the invention are described in, for example, in Nielsen et al., Science, 1991, 254, 1497-1500.

[0201] Some embodiments featured in the invention include RNAs with phosphorothioate backbones and oligonucleosides with heteroatom backbones, and in particular —CH₂—NH—CH₂—, —CH₂—N(CH₃)—O—CH₂— [known as a methylene (methylimino) or MMI backbone], —CH₂—O—N(CH₃)—CH₂—, —CH₂—N(CH₃)—N(CH₃)—CH₂— and —N(CH₃)—CH₂—CH₂— of the above-referenced U.S. Pat. No. 5,489,677, and the amide backbones of the above-referenced U.S. Pat. No. 5,602,240. In some embodiments, the RNAs featured herein have morpholino backbone structures of the above-referenced U.S. Pat. No. 5,034,506. The native phosphodiester backbone can be represented as O—P(O)(OH)—OCH₂—.

[0202] Modified RNAs can also contain one or more substituted sugar moieties. The iRNAs, e.g., dsRNAs, featured herein can include one of the following at the 2′-position: OH; F; O-, S-, or N-alkyl; O-, S-, or N-alkenyl; O-, S- or N-alkynyl; or O-alkyl-O-alkyl, wherein the alkyl, alkenyl and alkynyl can be substituted or unsubstituted C₁ to C₁₀ alkyl or C₂ to C₁₀ alkenyl and alkynyl. Exemplary suitable modifications include O[(CH₂)ₙO]ₘCH₃, O(CH₂)ₙOCH₃, O(CH₂)ₙNH₂, O(CH₂)ₙCH₃, O(CH₂)ₙONH₂, and O(CH₂)ₙON[(CH₂)·CH₃)]₂, where n and m are from 1 to about 10. In other embodiments, dsRNAs include one of the following at the 2′ position: C₁ to C₁₀ lower alkyl, substituted lower alkyl, alkaryl, aralkyl, O-alkaryl or O-aralkyl, SH, SCH₃, OCN, Cl, Br, CN, CF₃, OCF₃, SOCH₃, SO₂CH₃, ONO₂, NO₂, N₃, NH₂, heterocycloalkyl, heterocycloalkaryl, aminoalkylamino, polyalkylamino, substituted silyl, an RNA cleaving group, a reporter group, an intercalator, a group for improving the pharmacokinetic properties of an iRNA, or a group for improving the pharmacodynamic properties of an iRNA, and other substituents having similar properties. In some embodiments, the modification includes a 2′-methoxyethoxy (2′-O—CH₂CH₂OCH₃, also known as 2′-O-(2-methoxyethyl) or 2′-MOE) (Martin et al., Helv. Chim. Acta, 1995, 78:486-504) i.e., an alkoxy-alkoxy group. Another exemplary modification is 2′-dimethylaminooxyethoxy, i.e., a O(CH₂)₂ON(CH₃)₂ group, also known as 2′-DMAOE, as described in examples herein below, and 2′-dimethylaminoethoxyethoxy (also known in the art as 2′-O-dimethylaminoethoxyethyl or 2′-DMAEOE), i.e., 2′-O—CH₂—O—CH₂—N(CH₂)₂. Further exemplary modifications include: 5′-Me-2′-F nucleotides, 5′-Me-2′-OMe nucleotides, 5′-Me-2′-deoxynucleotides, (both R and S isomers in these three families); 2′-alkoxyalkyl; and 2′-NMA (N-methylacetamide).

[0203] Other modifications include 2′-methoxy (2′-OCH₃), 2′-aminopropoxy (2′-OCH₂CH₂CH₂NH₂) and 2′-fluoro (2′-F). Similar modifications can also be made at other positions on the RNA of an iRNA, particularly the 3′ position of the sugar on the 3′ terminal nucleotide or in 2′-5′ linked dsRNAs and the 5′ position of 5′ terminal nucleotide. iRNAs can also have sugar mimetics such as cyclobutyl moieties in place of the pentofuranosyl sugar. Representative US patents that teach the preparation of such modified sugar structures include, but are not limited to, U.S. Pat. Nos. 4,981,957; 5,118,800; 5,319,080; 5,359,044; 5,393,878; 5,446,137; 5,466,786; 5,514,785; 5,519,134; 5,567,811; 5,576,427; 5,591,722; 5,597,909; 5,610,300; 5,627,053; 5,639,873; 5,646,265; 5,658,873; 5,670,633; and 5,700,920, certain of which are commonly owned with the instant application. The entire contents of each of the foregoing are hereby incorporated herein by reference.

[0204] An iRNA can also include nucleobase (often referred to in the art simply as “base”) modifications or substitutions. As used herein, “unmodified” or “natural” nucleobases include the purine bases adenine (A) and guanine (G), and the pyrimidine bases thymine (T), cytosine (C), and uracil (U). Modified nucleobases include other synthetic and natural nucleobases such as deoxythimidine (dT), 5-methylcytosine (5-me-C), 5-hydroxymethyl cytosine, xanthine, hypoxanthine, 2-aminoadenine, 6-methyl and other alkyl derivatives of adenine and guanine, 2-propyl and other alkyl derivatives of adenine and guanine, 2-thiouracil, 2-thiothymine and 2-thiocytosine, 5-halouracil and cytosine, 5-propynyl uracil and cytosine, 6-azo uracil, cytosine and thymine, 5-uracil (pseudouracil), 4-thiouracil, 8-halo, 8-amino, 8-thiol, 8-thioalkyl, 8-hydroxyl anal other 8-substituted adenines and guanines, 5-halo, particularly 5-bromo, 5-trifluoromethyl and other 5-substituted uracils and cytosines, 7-methylguanine and 7-methyladenine, 8-azaguanine and 8-azaadenine, 7-deazaguanine and 7-daazaadenine and 3-deazaguanine and 3-deazaadenine. Further nucleobases include those disclosed in U.S. Pat. No. 3,687,808, those disclosed in Modified Nucleosides in Biochemistry, Biotechnology and Medicine, Herdewijn, P. ed. Wiley-VCH, 2008; those disclosed in The Concise Encyclopedia Of Polymer Science And Engineering, pages 858-859, Kroschwitz, J. L, ed. John Wiley & Sons, 1990, these disclosed by Englisch et al., Angewandte Chemie, International Edition, 1991, 30, 613, and those disclosed by Sanghvi, Y S., Chapter 15, dsRNA Research and Applications, pages 289-302, Crooke, S. T. and Lebleu, B., Ed., CRC Press, 1993. Certain of these nucleobases are particularly useful for increasing the binding affinity of the oligomeric compounds featured in the invention. These include 5-substituted pyrimidines, 6-azapyrimidines and N-2, N-6 and 0-6 substituted purines, including 2-aminopropyladenine, 5-propynyluracil and 5-propynylcytosine. 5-methylcytosine substitutions have been shown to increase nucleic acid duplex stability by 0.6-1.2° C. (Sanghvi, Y. S., Crooke, S. T. and Lebleu, B., Eds., dsRNA Research and Applications, CRC Press, Boca Raton, 1993, pp. 276-278) and are exemplary base substitutions, even more particularly when combined with 2′-O-methoxyethyl sugar modifications.

[0205] Representative U.S. patents that teach the preparation of certain of the above noted modified nucleobases as well as other modified nucleobases include, but are not limited to, the above noted U.S. Pat. Nos. 3,687,808, 4,845,205; 5,130,30; 5,134,066; 5,175,273; 5,367,066; 5,432,272; 5,457,187; 5,459,255; 5,484,908; 5,502,177; 5,525,711; 5,552,540; 5,587,469; 5,594,121, 5,596,091; 5,614,617; 5,681,941; 5,750,692; 6,015,886; 6,147,200; 6,166,197; 6,222,025; 6,235,887; 6,380,368; 6,528,640; 6,639,062; 6,617,438; 7,045,610; 7,427,672; and 7,495,088, the entire contents of each of which are hereby incorporated herein by reference.

[0206] In some embodiments, an iRNA agent of the disclosure can also be modified to include one or more bicyclic sugar moieties. A “bicyclic sugar” is a furanosyl ring modified by the bridging of two atoms. A “bicyclic sugar” is a furanosyl ring modified by a ring formed by the bridging of two carbons, whether adjacent or non-adjacent atoms. A “bicyclic nucleoside” (“BNA”) is a nucleoside having a sugar moiety comprising a bridge a ring formed by bridging connecting two carbons, whether adjacent or non-adjacent, atoms of the sugar ring, thereby forming a bicyclic ring system. In certain embodiments, the bridge connects the 4′-carbon and the 2′-carbon of the sugar ring, optionally, via the 2′-acyclic oxygen atoms. Thus, in some embodiments an agent of the invention may include one or more locked nucleic acids (LNA). A locked nucleic acid is a nucleotide having a modified ribose moiety in which the ribose moiety comprises an extra bridge connecting the 2′ and 4′ carbons. In other words, an LNA is a nucleotide comprising a bicyclic sugar moiety comprising a 4′-CH₂—O-2′ bridge. This structure effectively “locks” the ribose in the 3′-endo structural conformation. The addition of locked nucleic acids to siRNAs has been shown to increase siRNA stability in serum, and to reduce off-target effects (Elmen, J. et al., (2005) Nucleic Acids Research 33(1):439-447; Mook, O R. et al., (2007) Mol Canc Ther 6(3):833-843; Grunweller, A. et al., (2003) Nucleic Acids Research 31(12):3185-3193). Examples of bicyclic nucleosides for use in the polynucleotides of the invention include without limitation nucleosides comprising a bridge between the 4′ and the 2′ ribosyl ring atoms. In certain embodiments, the antisense polynucleotide agents of the invention include one or more bicyclic nucleosides comprising a 4′ to 2′ bridge.

[0207] A locked nucleoside can be represented by the structure (omitting stereochemistry),

[chemical structure]

[0208] wherein B is a nucleobase or modified nucleobase and L is the linking group that joins the 2′-carbon to the 4′-carbon of the ribose ring.

[0209] Examples of such 4′ to 2′ bridged bicyclic nucleosides, include but are not limited to 4′-(CH₂)—O-2′ (LNA); 4′-(CH₂)—S-2′; 4′-(CH₂)₂—O-2′ (ENA); 4′-CH(CH₃)—O-2′ (also referred to as “constrained ethyl” or “cEt”) and 4′-CH(CH₂OCH₃)—O-2′ (and analogs thereof; see, e.g., U.S. Pat. No. 7,399,845); 4′-C(CH₃)(CH₃)—O-2′ (and analogs thereof; see e.g., U.S. Pat. No. 8,278,283); 4′-CH₂—N(OCH₃)-2′ (and analogs thereof; see e.g., U.S. Pat. No. 8,278,425); 4′-CH₂—O—N(CH₃)-2′ (see, e.g., U.S. Patent Publication No. 2004/0171570); 4′-CH₂—N(R)—O-2′, wherein R is H, C1-C12 alkyl, or a nitrogen protecting group (see, e.g., U.S. Pat. No. 7,427,672); 4′-CH₂—C(H)(CH₃)-2′ (see, e.g., Chattopadhyaya et al., J. Org. Chem., 2009, 74, 118-134); and 4′-CH₂—C(═CH₂)-2′ (and analogs thereof; see, e.g., U.S. Pat. No. 8,278,426). The entire contents of each of the foregoing are hereby incorporated herein by reference.

[0210] Additional representative U.S. patents and U.S. patenttent Publications that teach the preparation of locked nucleic acid nucleotides include, but are not limited to, the following: U.S. Pat. Nos. 6,268,490; 6,525,191; 6,670,461; 6,770,748; 6,794,499; 6,998,484; 7,053,207; 7,034,133; 7,084,125; 7,399,845; 7,427,672; 7,569,686; 7,741,457; 8,022,193; 8,030,467; 8,278,425; 8,278,426; 8,278,283; US 2008/0039618; and US 2009/0012281, the entire contents of each of which are hereby incorporated herein by reference.

[0211] Any of the foregoing bicyclic nucleosides can be prepared having one or more stereochemical sugar configurations including for example α-L-ribofuranose and β-D-ribofuranose (see WO 99/14226).

[0212] An iRNA agent of the disclosure can also be modified to include one or more constrained ethyl nucleotides. As used herein, a “constrained ethyl nucleotide” or “cEt” is a locked nucleic acid comprising a bicyclic sugar moiety comprising a 4′-CH(CH₃)—O-2′ bridge (i.e., L in the preceding structure). In one embodiment, a constrained ethyl nucleotide is in the S conformation referred to herein as “S-cEt.”

[0213] An iRNA of the invention may also include one or more “conformationally restricted nucleotides” (“CRN”). CRN are nucleotide analogs with a linker connecting the C2′ and C4′ carbons of ribose or the CFB and —C5′ carbons of ribose. CRN lock the ribose ring into a stable conformation and increase the hybridization affinity to mRNA. The linker is of sufficient length to place the oxygen in an optimal position for stability and affinity resulting in less ribose ring puckering.

[0214] Representative publications that teach the preparation of certain of the above noted CRN include, but are not limited to, US2013/0190383; and WO2013/036868, the entire contents of each of which are hereby incorporated herein by reference.

[0215] In some embodiments, an iRNA of the invention comprises one or more monomers that are UNA (unlocked nucleic acid) nucleotides. UNA is unlocked acyclic nucleic acid, wherein any of the bonds of the sugar has been removed, forming an unlocked “sugar” residue. In one example, UNA also encompasses monomer with bonds between C1′-C4′ have been removed (i.e. the covalent carbon-oxygen-carbon bond between the C1′ and C4′ carbons). In another example, the C2′-C3′ bond (i.e. the covalent carbon-carbon bond between the C2′ and C3′ carbons) of the sugar has been removed (see Nuc. Acids Symp. Series, 52, 133-134 (2008) and Fluiter et al., Mol. Biosyst., 2009, 10, 1039 hereby incorporated by reference).

[0216] Representative U.S. publications that teach the preparation of UNA include, but are not limited to, U.S. Pat. No. 8,314,227; and US2013/0096289; US2013/0011922; and US2011/0313020, the entire contents of each of which are hereby incorporated herein by reference.

[0217] Potentially stabilizing modifications to the ends of RNA molecules can include N-(acetylaminocaproyl)-4-hydroxyprolinol (Hyp-C6-NHAc), N-(caproyl-4-hydroxyprolinol (Hyp-C6), N-(acetyl-4-hydroxyprolinol (Hyp-NHAc), thymidine-2′-O-deoxythymidine (ether), N-(aminocaproyl)-4-hydroxyprolinol (Hyp-C6-amino), 2-docosanoyl-uridine-3″-phosphate, inverted base dT(idT) and others. Disclosure of this modification can be found in WO2011/005861.

[0218] Other modifications of the nucleotides of an iRNA of the invention include a 5′ phosphate or 5′ phosphate mimic, e.g., a 5′-terminal phosphate or phosphate mimic on the antisense strand of an iRNA. Suitable phosphate mimics are disclosed in, for example US2012/0157511, the entire contents of which are incorporated herein by reference.

[0219] A. Modified iRNAs Comprising Motifs of the Invention

[0220] In certain aspects of the invention, the double stranded RNA agents of the invention include agents with chemical modifications as disclosed, for example, in WO2013/075035, the entire contents of each of which are incorporated herein by reference. As shown herein and in WO2013/075035, one or more motifs of three identical modifications on three consecutive nucleotides may be introduced into a sense strand or antisense strand of a dsRNAi agent, particularly at or near the cleavage site. In some embodiments, the sense strand and antisense strand of the dsRNAi agent may otherwise be completely modified. The introduction of these motifs interrupts the modification pattern, if present, of the sense or antisense strand. The dsRNAi agent may be optionally conjugated with a GalNAc derivative ligand, for instance on the sense strand.

[0221] More specifically, when the sense strand and antisense strand of the double stranded RNA agent are completely modified to have one or more motifs of three identical modifications on three consecutive nucleotides at or near the cleavage site of at least one strand of a dsRNAi agent, the gene silencing activity of the dsRNAi agent was observed.

[0222] Accordingly, the invention provides double stranded RNA agents capable of inhibiting the expression of a target gene (i.e., CFB gene) in vivo. The RNAi agent comprises a sense strand and an antisense strand. Each strand of the RNAi agent may be, for example, 17-30 nucleotides in length, 25-30 nucleotides in length, 27-30 nucleotides in length, 19-25 nucleotides in length, 19-23 nucleotides in length, 19-21 nucleotides in length, 21-25 nucleotides in length, or 21-23 nucleotides in length.

[0223] The sense strand and antisense strand typically form a duplex double stranded RNA (“dsRNA”), also referred to herein as “dsRNAi agent.” The duplex region of a dsRNAi agent may be, for example, the duplex region can be 27-30 nucleotide pairs in length, 19-25 nucleotide pairs in length, 19-23 nucleotide pairs in length, 19-21 nucleotide pairs in length, 21-25 nucleotide pairs in length, or 21-23 nucleotide pairs in length. In another example, the duplex region is selected from 19, 20, 21, 22, 23, 24, 25, 26, and 27 nucleotides in length.

[0224] In certain embodiments, the dsRNAi agent may contain one or more overhang regions or capping groups at the 3′-end, 5′-end, or both ends of one or both strands. The overhang can be, independently, 1-6 nucleotides in length, for instance 2-6 nucleotides in length, 1-5 nucleotides in length, 2-5 nucleotides in length, 1-4 nucleotides in length, 2-4 nucleotides in length, 1-3 nucleotides in length, 2-3 nucleotides in length, or 1-2 nucleotides in length. In certain embodiments, the overhang regions can include extended overhang regions as provided above. The overhangs can be the result of one strand being longer than the other, or the result of two strands of the same length being staggered. The overhang can form a mismatch with the target mRNA or it can be complementary to the gene sequences being targeted or can be another sequence. The first and second strands can also be joined, e.g., by additional bases to form a hairpin, or by other non-base linkers.

[0225] In certain embodiments, the nucleotides in the overhang region of the dsRNAi agent can each independently be a modified or unmodified nucleotide including, but no limited to 2′-sugar modified, such as, 2′-F, 2′-O-methyl, thymidine (T), 2′-O-methoxyethyl-5-methyluridine (Teo), 2′-O-methoxyethyladenosine (Aeo), 2′-O-methoxyethyl-5-methylcytidine (m5Ceo), and any combinations thereof.

[0226] For example, TT can be an overhang sequence for either end on either strand. The overhang can form a mismatch with the target mRNA or it can be complementary to the gene sequences being targeted or can be another sequence.

[0227] The 5′- or 3′-overhangs at the sense strand, antisense strand, or both strands of the dsRNAi agent may be phosphorylated. In some embodiments, the overhang region(s) contains two nucleotides having a phosphorothioate between the two nucleotides, where the two nucleotides can be the same or different. In some embodiments, the overhang is present at the 3′-end of the sense strand, antisense strand, or both strands. In some embodiments, this 3′-overhang is present in the antisense strand. In some embodiments, this 3′-overhang is present in the sense strand.

[0228] The RNAi agent may contain only a single overhang, which can strengthen the interference activity of the RNAi, without affecting its overall stability. For example, the single-stranded overhang may be located at the 3′-end of the sense strand or, alternatively, at the 3-end of the antisense strand. The RNAi may also have a blunt end, located at the 5′-end of the antisense strand (i.e., the 3′-end of the sense strand) or vice versa. Generally, the antisense strand of the dsRNAi agent has a nucleotide overhang at the 3′-end, and the 5′-end is blunt. While not wishing to be bound by theory, the asymmetric blunt end at the 5′-end of the antisense strand and 3′-end overhang of the antisense strand favor the guide strand loading into RISC process.

[0229] In certain embodiments, the dsRNAi agent is a double blunt-ended of 19 nucleotides in length, wherein the sense strand contains at least one motif of three 2′-F modifications on three consecutive nucleotides at positions 7, 8, and 9 from the 5′end. The antisense strand contains at least one motif of three 2′-O-methyl modifications on three consecutive nucleotides at positions 11, 12, and 13 from the 5′end.

[0230] In other embodiments, the dsRNAi agent is a double blunt-ended of 20 nucleotides in length, wherein the sense strand contains at least one motif of three 2′-F modifications on three consecutive nucleotides at positions 8, 9, and 10 from the 5′end. The antisense strand contains at least one motif of three 2′-O-methyl modifications on three consecutive nucleotides at positions 11, 12, and 13 from the 5′end.

[0231] In yet other embodiments, the dsRNAi agent is a double blunt-ended of 21 nucleotides in length, wherein the sense strand contains at least one motif of three 2′-F modifications on three consecutive nucleotides at positions 9, 10, and 11 from the 5′end. The antisense strand contains at least one motif of three 2′-O-methyl modifications on three consecutive nucleotides at positions 11, 12, and 13 from the 5′end.

[0232] In certain embodiments, the dsRNAi agent comprises a 21 nucleotide sense strand and a 23 nucleotide antisense strand, wherein the sense strand contains at least one motif of three 2′-F modifications on three consecutive nucleotides at positions 9, 10, and 11 from the 5′end; the antisense strand contains at least one motif of three 2′-O-methyl modifications on three consecutive nucleotides at positions 11, 12, and 13 from the 5′end, wherein one end of the RNAi agent is blunt, while the other end comprises a two nucleotide overhang. in one embodiment, the two nucleotide overhang is at the 3′-end of the antisense strand.

[0233] When the two nucleotide overhang is at the 3′-end of the antisense strand, there may be two phosphorothioate internucleotide linkages between the terminal three nucleotides, wherein two of the three nucleotides are the overhang nucleotides, and the third nucleotide is a paired nucleotide next to the overhang nucleotide. In one embodiment, the RNAi agent additionally has two phosphorothioate internucleotide linkages between the terminal three nucleotides at both the 5′-end of the sense strand and at the 5′-end of the antisense strand. In certain embodiments, every nucleotide in the sense strand and the antisense strand of the dsRNAi agent, including the nucleotides that are part of the motifs are modified nucleotides. In certain embodiments each residue is independently modified with a 2′-O-methyl or 2′-fluoro, e.g., in an alternating motif. Optionally, the dsRNAi agent further comprises a ligand (such as, GalNAc).

[0234] In certain embodiments, the dsRNAi agent comprises a sense and an antisense strand, wherein the sense strand is 25-30 nucleotide residues in length, wherein starting from the 5′ terminal nucleotide (position 1) positions 1 to 23 of the first strand comprise at least 8 ribonucleotides; the antisense strand is 36-66 nucleotide residues in length and, starting from the 3′ terminal nucleotide, comprises at least 8 ribonucleotides in the positions paired with positions 1-23 of sense strand to form a duplex; wherein at least the 3′ terminal nucleotide of antisense strand is unpaired with sense strand, and up to 6 consecutive 3′ terminal nucleotides are unpaired with sense strand, thereby forming a 3′ single stranded overhang of 1-6 nucleotides; wherein the 5′ terminus of antisense strand comprises from 10-30 consecutive nucleotides which are unpaired with sense strand, thereby forming a 10-30 nucleotide single stranded 5′ overhang; wherein at least the sense strand 5′ terminal and 3′ terminal nucleotides are base paired with nucleotides of antisense strand when sense and antisense strands are aligned for maximum complementarity, thereby forming a substantially duplexed region between sense and antisense strands; and antisense strand is sufficiently complementary to a target RNA along at least 19 ribonucleotides of antisense strand length to reduce target gene expression when the double stranded nucleic acid is introduced into a mammalian cell; and wherein the sense strand contains at least one motif of three 2′-F modifications on three consecutive nucleotides, where at least one of the motifs occurs at or near the cleavage site. The antisense strand contains at least one motif of three 2′-O-methyl modifications on three consecutive nucleotides at or near the cleavage site.

[0235] In certain embodiments, the dsRNAi agent comprises sense and antisense strands, wherein the dsRNAi agent comprises a first strand having a length which is at least 25 and at most 29 nucleotides and a second strand having a length which is at most 30 nucleotides with at least one motif of three 2′-O-methyl modifications on three consecutive nucleotides at position 11, 12, and 13 from the 5′ end; wherein the 3′ end of the first strand and the 5′ end of the second strand form a blunt end and the second strand is 1-4 nucleotides longer at its 3′ end than the first strand, wherein the duplex region which is at least 25 nucleotides in length, and the second strand is sufficiently complementary to a target mRNA along at least 19 nucleotide of the second strand length to reduce target gene expression when the RNAi agent is introduced into a mammalian cell, and wherein Dicer cleavage of the dsRNAi agent results in an siRNA comprising the 3′-end of the second strand, thereby reducing expression of the target gene in the mammal. Optionally, the dsRNAi agent further comprises a ligand.

[0236] In certain embodiments, the sense strand of the dsRNAi agent contains at least one motif of three identical modifications on three consecutive nucleotides, where one of the motifs occurs at the cleavage site in the sense strand.

[0237] In certain embodiments, the antisense strand of the dsRNAi agent can also contain at least one motif of three identical modifications on three consecutive nucleotides, where one of the motifs occurs at or near the cleavage site in the antisense strand.

[0238] For a dsRNAi agent having a duplex region of 19-23 nucleotides in length, the cleavage site of the antisense strand is typically around the 10, 11, and 12 positions from the 5′-end. Thus the motifs of three identical modifications may occur at the 9, 10, and 11 positions; the 10, 11, and 12 positions; the 11, 12, and 13 positions; the 12, 13, and 14 positions; or the 13, 14, and 15 positions of the antisense strand, the count starting from the first nucleotide from the 5′-end of the antisense strand, or, the count starting from the first paired nucleotide within the duplex region from the 5′-end of the antisense strand. The cleavage site in the antisense strand may also change according to the length of the duplex region of the dsRNAi agent from the 5′-end.

[0239] The sense strand of the dsRNAi agent may contain at least one motif of three identical modifications on three consecutive nucleotides at the cleavage site of the strand; and the antisense strand may have at least one motif of three identical modifications on three consecutive nucleotides at or near the cleavage site of the strand. When the sense strand and the antisense strand form a dsRNA duplex, the sense strand and the antisense strand can be so aligned that one motif of the three nucleotides on the sense strand and one motif of the three nucleotides on the antisense strand have at least one nucleotide overlap, i.e., at least one of the three nucleotides of the motif in the sense strand forms a base pair with at least one of the three nucleotides of the motif in the antisense strand. Alternatively, at least two nucleotides may overlap, or all three nucleotides may overlap.

[0240] In some embodiments, the sense strand of the dsRNAi agent may contain more than one motif of three identical modifications on three consecutive nucleotides. The first motif may occur at or near the cleavage site of the strand and the other motifs may be a wing modification. The term “wing modification” herein refers to a motif occurring at another portion of the strand that is separated from the motif at or near the cleavage site of the same strand. The wing modification is either adjacent to the first motif or is separated by at least one or more nucleotides. When the motifs are immediately adjacent to each other then the chemistries of the motifs are distinct from each other, and when the motifs are separated by one or more nucleotide than the chemistries can be the same or different. Two or more wing modifications may be present. For instance, when two wing modifications are present, each wing modification may occur at one end relative to the first motif which is at or near cleavage site or on either side of the lead motif.

[0241] Like the sense strand, the antisense strand of the dsRNAi agent may contain more than one motifs of three identical modifications on three consecutive nucleotides, with at least one of the motifs occurring at or near the cleavage site of the strand. This antisense strand may also contain one or more wing modifications in an alignment similar to the wing modifications that may be present on the sense strand.

[0242] In some embodiments, the wing modification on the sense strand or antisense strand of the dsRNAi agent typically does not include the first one or two terminal nucleotides at the 3′-end, 5′-end, or both ends of the strand.

[0243] In other embodiments, the wing modification on the sense strand or antisense strand of the dsRNAi agent typically does not include the first one or two paired nucleotides within the duplex region at the 3′-end, 5′-end, or both ends of the strand.

[0244] When the sense strand and the antisense strand of the dsRNAi agent each contain at least one wing modification, the wing modifications may fall on the same end of the duplex region, and have an overlap of one, two, or three nucleotides.

[0245] When the sense strand and the antisense strand of the dsRNAi agent each contain at least two wing modifications, the sense strand and the antisense strand can be so aligned that two modifications each from one strand fall on one end of the duplex region, having an overlap of one, two, or three nucleotides; two modifications each from one strand fall on the other end of the duplex region, having an overlap of one, two or three nucleotides; two modifications one strand fall on each side of the lead motif, having an overlap of one, two or three nucleotides in the duplex region.

[0246] In some embodiments, every nucleotide in the sense strand and antisense strand of the dsRNAi agent, including the nucleotides that are part of the motifs, may be modified. Each nucleotide may be modified with the same or different modification which can include one or more alteration of one or both of the non-linking phosphate oxygens or of one or more of the linking phosphate oxygens; alteration of a constituent of the ribose sugar, e.g., of the 2′-hydroxyl on the ribose sugar; wholesale replacement of the phosphate moiety with “dephospho” linkers; modification or replacement of a naturally occurring base; and replacement or modification of the ribose-phosphate backbone.

[0247] As nucleic acids are polymers of subunits, many of the modifications occur at a position which is repeated within a nucleic acid, e.g., a modification of a base, or a phosphate moiety, or a non-linking O of a phosphate moiety. In some cases the modification will occur at all of the subject positions in the nucleic acid but in many cases it will not. By way of example, a modification may only occur at a 3′- or 5′ terminal position, may only occur in a terminal region, e.g., at a position on a terminal nucleotide or in the last 2, 3, 4, 5, or 10 nucleotides of a strand. A modification may occur in a double strand region, a single strand region, or in both. A modification may occur only in the double strand region of an RNA or may only occur in a single strand region of a RNA. For example, a phosphorothioate modification at a non-linking O position may only occur at one or both termini, may only occur in a terminal region, e.g., at a position on a terminal nucleotide or in the last 2, 3, 4, 5, or 10 nucleotides of a strand, or may occur in double strand and single strand regions, particularly at termini. The 5′-end or ends can be phosphorylated.

[0248] It may be possible, e.g., to enhance stability, to include particular bases in overhangs, or to include modified nucleotides or nucleotide surrogates, in single strand overhangs, e.g., in a 5′- or 3′-overhang, or in both. For example, it can be desirable to include purine nucleotides in overhangs. In some embodiments all or some of the bases in a 3′- or 5′-overhang may be modified, e.g., with a modification described herein. Modifications can include, e.g., the use of modifications at the 2′ position of the ribose sugar with modifications that are known in the art, e.g., the use of deoxyribonucleotides, 2′-deoxy-2′-fluoro (2′-F) or 2′-O-methyl modified instead of the ribosugar of the nucleobase, and modifications in the phosphate group, e.g., phosphorothioate modifications. Overhangs need not be homologous with the target sequence.

[0249] In some embodiments, each residue of the sense strand and antisense strand is independently modified with LNA, CRN, cET, UNA, HNA, CeNA, 2′-methoxyethyl, 2′-O-methyl, 2′-O-allyl, 2′-C-allyl, 2′-deoxy, 2′-hydroxyl, or 2′-fluoro. The strands can contain more than one modification. In one embodiment, each residue of the sense strand and antisense strand is independently modified with 2′-O-methyl or 2′-fluoro.

[0250] At least two different modifications are typically present on the sense strand and antisense strand. Those two modifications may be the 2′-O-methyl or 2′-fluoro modifications, or others.

[0251] In certain embodiments, the Nₐ or N_{b} comprise modifications of an alternating pattern. The term “alternating motif” as used herein refers to a motif having one or more modifications, each modification occurring on alternating nucleotides of one strand. The alternating nucleotide may refer to one per every other nucleotide or one per every three nucleotides, or a similar pattern. For example, if A, B and C each represent one type of modification to the nucleotide, the alternating motif can be “ABABABABABAB . . . ,” “AABBAABBAABB . . . ,” “AABAABAABAAB . . . ,” “AAABAAABAAAB . . . ,” “AAABBBAAABBB . . . ,” or “ABCABCABCABC . . . ,” etc.

[0252] The type of modifications contained in the alternating motif may be the same or different. For example, if A, B, C, D each represent one type of modification on the nucleotide, the alternating pattern, i.e., modifications on every other nucleotide, may be the same, but each of the sense strand or antisense strand can be selected from several possibilities of modifications within the alternating motif such as “ABABAB . . . ”, “ACACAC . . . ” “BDBDBD . . . ” or “CDCDCD . . . ,” etc.

[0253] In some embodiments, the dsRNAi agent of the invention comprises the modification pattern for the alternating motif on the sense strand relative to the modification pattern for the alternating motif on the antisense strand is shifted. The shift may be such that the modified group of nucleotides of the sense strand corresponds to a differently modified group of nucleotides of the antisense strand and vice versa. For example, the sense strand when paired with the antisense strand in the dsRNA duplex, the alternating motif in the sense strand may start with “ABABAB” from 5′ to 3′ of the strand and the alternating motif in the antisense strand may start with “BABABA” from 5′ to 3′ of the strand within the duplex region. As another example, the alternating motif in the sense strand may start with “AABBAABB” from 5′ to 3′ of the strand and the alternating motif in the antisense strand may start with “BBAABBAA” from 5′ to 3′ of the strand within the duplex region, so that there is a complete or partial shift of the modification patterns between the sense strand and the antisense strand.

[0254] In some embodiments, the dsRNAi agent comprises the pattern of the alternating motif of 2′-O-methyl modification and 2′-F modification on the sense strand initially has a shift relative to the pattern of the alternating motif of 2′-O-methyl modification and 2′-F modification on the antisense strand initially, i.e., the 2′-O-methyl modified nucleotide on the sense strand base pairs with a 2′-F modified nucleotide on the antisense strand and vice versa. The 1 position of the sense strand may start with the 2′-F modification, and the 1 position of the antisense strand may start with the 2′-O-methyl modification.

[0255] The introduction of one or more motifs of three identical modifications on three consecutive nucleotides to the sense strand or antisense strand interrupts the initial modification pattern present in the sense strand or antisense strand. This interruption of the modification pattern of the sense or antisense strand by introducing one or more motifs of three identical modifications on three consecutive nucleotides to the sense or antisense strand may enhance the gene silencing activity against the target gene.

[0256] In some embodiments, when the motif of three identical modifications on three consecutive nucleotides is introduced to any of the strands, the modification of the nucleotide next to the motif is a different modification than the modification of the motif. For example, the portion of the sequence containing the motif is “ . . . NₐYYYN_{b} . . . ,” where “Y” represents the modification of the motif of three identical modifications on three consecutive nucleotide, and “Nₐ” and “N_{b}” represent a modification to the nucleotide next to the motif “YYY” that is different than the modification of Y, and where Nₐ and N_{b} can be the same or different modifications. Alternatively, Nₐ or N_{b} may be present or absent when there is a wing modification present.

[0257] The iRNA may further comprise at least one phosphorothioate or methylphosphonate internucleotide linkage. The phosphorothioate or methylphosphonate internucleotide linkage modification may occur on any nucleotide of the sense strand, antisense strand, or both strands in any position of the strand. For instance, the internucleotide linkage modification may occur on every nucleotide on the sense strand or antisense strand; each internucleotide linkage modification may occur in an alternating pattern on the sense strand or antisense strand; or the sense strand or antisense strand may contain both internucleotide linkage modifications in an alternating pattern. The alternating pattern of the internucleotide linkage modification on the sense strand may be the same or different from the antisense strand, and the alternating pattern of the internucleotide linkage modification on the sense strand may have a shift relative to the alternating pattern of the internucleotide linkage modification on the antisense strand. In one embodiment, a double-stranded RNAi agent comprises 6-8 phosphorothioate internucleotide linkages. In some embodiments, the antisense strand comprises two phosphorothioate internucleotide linkages at the 5′-end and two phosphorothioate internucleotide linkages at the 3′-end, and the sense strand comprises at least two phosphorothioate internucleotide linkages at either the 5′-end or the 3′-end.

[0258] In some embodiments, the dsRNAi agent comprises a phosphorothioate or methylphosphonate internucleotide linkage modification in the overhang region. For example, the overhang region may contain two nucleotides having a phosphorothioate or methylphosphonate internucleotide linkage between the two nucleotides. Internucleotide linkage modifications also may be made to link the overhang nucleotides with the terminal paired nucleotides within the duplex region. For example, at least 2, 3, 4, or all the overhang nucleotides may be linked through phosphorothioate or methylphosphonate internucleotide linkage, and optionally, there may be additional phosphorothioate or methylphosphonate internucleotide linkages linking the overhang nucleotide with a paired nucleotide that is next to the overhang nucleotide. For instance, there may be at least two phosphorothioate internucleotide linkages between the terminal three nucleotides, in which two of the three nucleotides are overhang nucleotides, and the third is a paired nucleotide next to the overhang nucleotide. These terminal three nucleotides may be at the 3′-end of the antisense strand, the 3′-end of the sense strand, the 5′-end of the antisense strand, or the 5′end of the antisense strand.

[0259] In some embodiments, the 2-nucleotide overhang is at the 3′-end of the antisense strand, and there are two phosphorothioate internucleotide linkages between the terminal three nucleotides, wherein two of the three nucleotides are the overhang nucleotides, and the third nucleotide is a paired nucleotide next to the overhang nucleotide. Optionally, the dsRNAi agent may additionally have two phosphorothioate internucleotide linkages between the terminal three nucleotides at both the 5′-end of the sense strand and at the 5′-end of the antisense strand.

[0260] In one embodiment, the dsRNAi agent comprises mismatch(es) with the target, within the duplex, or combinations thereof. The mismatch may occur in the overhang region or the duplex region. The base pair may be ranked on the basis of their propensity to promote dissociation or melting (e.g., on the free energy of association or dissociation of a particular pairing, the simplest approach is to examine the pairs on an individual pair basis, though next neighbor or similar analysis can also be used). In terms of promoting dissociation: A:U is preferred over G:C; G:U is preferred over G:C; and I:C is preferred over G:C (I=inosine). Mismatches, e.g., non-canonical or other than canonical pairings (as described elsewhere herein) are preferred over canonical (A:T, A:U, G:C) pairings; and pairings which include a universal base are preferred over canonical pairings.

[0261] In certain embodiments, the dsRNAi agent comprises at least one of the first 1, 2, 3, 4, or 5 base pairs within the duplex regions from the 5′-end of the antisense strand independently selected from the group of: A:U, G:U, I:C, and mismatched pairs, e.g., non-canonical or other than canonical pairings or pairings which include a universal base, to promote the dissociation of the antisense strand at the 5′-end of the duplex.

[0262] In certain embodiments, the nucleotide at the 1 position within the duplex region from the 5′-end in the antisense strand is selected from A, dA, dU, U, and dT. Alternatively, at least one of the first 1, 2, or 3 base pair within the duplex region from the 5′-end of the antisense strand is an AU base pair. For example, the first base pair within the duplex region from the 5′-end of the antisense strand is an AU base pair.

[0263] In other embodiments, the nucleotide at the 3′-end of the sense strand is deoxythimidine (dT) or the nucleotide at the 3′-end of the antisense strand is deoxythimidine (dT). For example, there is a short sequence of deoxythimidine nucleotides, for example, two dT nucleotides on the 3′-end of the sense, antisense strand, or both strands.

[0264] In certain embodiments, the sense strand sequence may be represented by formula (I):

5′ nₚ-Nₐ—(XXX)ᵢ—N_{b}—YYY—N_{b}—(ZZZ)ⱼ—Nₐ-n_{q} 3′ (I)
[0265] wherein:
[0266] i and j are each independently 0 or 1;
[0267] p and q are each independently 0-6;
[0268] each Nₐ independently represents an oligonucleotide sequence comprising 0-25 modified nucleotides, each sequence comprising at least two differently modified nucleotides;
[0269] each N_{b} independently represents an oligonucleotide sequence comprising 0-10 modified nucleotides;
[0270] each nₚ and n_{q} independently represent an overhang nucleotide;
[0271] wherein N_{b} and Y do not have the same modification; and
[0272] XXX, YYY, and ZZZ each independently represent one motif of three identical modifications on three consecutive nucleotides. In one embodiment, YYY is all 2′-F modified nucleotides.

[0273] In some embodiments, the Nₐ or N_{b} comprises modifications of alternating pattern.

[0274] In some embodiments, the YYY motif occurs at or near the cleavage site of the sense strand. For example, when the dsRNAi agent has a duplex region of 17-23 nucleotides in length, the YYY motif can occur at or the vicinity of the cleavage site (e.g.: can occur at positions 6, 7, 8; 7, 8, 9; 8, 9, 10; 9, 10, 11; 10, 11, 12; or 11, 12, 13) of the sense strand, the count starting from the first nucleotide, from the 5′-end; or optionally, the count starting at the first paired nucleotide within the duplex region, from the 5′-end.

[0275] In one embodiment, i is 1 and j is 0, or i is 0 and j is 1, or both i and j are 1. The sense strand can therefore be represented by the following formulas:

5′ nₚ-Nₐ—YYY—N_{b}—ZZZ—Nₐ-n_{q} 3′ (Ib);

5′ nₚ-Nₐ—XXX—N_{b}—YYY—Nₐ-n_{q} 3′ (Ic); or

5′ nₚ-Nₐ—XXX—N_{b}—YYY—N_{b}—ZZZ—Nₐ-n_{q} 3′ (Id).

[0276] When the sense strand is represented by formula (Ib), N_{b} represents an oligonucleotide sequence comprising 0-10, 0-7, 0-5, 0-4, 0-2, or 0 modified nucleotides. Each Nₐ independently can represent an oligonucleotide sequence comprising 2-20, 2-15, or 2-10 modified nucleotides.

[0277] When the sense strand is represented as formula (Ic), N_{b} represents an oligonucleotide sequence comprising 0-10, 0-7, 0-10, 0-7, 0-5, 0-4, 0-2, or 0 modified nucleotides. Each Nₐ can independently represent an oligonucleotide sequence comprising 2-20, 2-15, or 2-10 modified nucleotides.

[0278] When the sense strand is represented as formula (Id), each N_{b} independently represents an oligonucleotide sequence comprising 0-10, 0-7, 0-5, 0-4, 0-2, or 0 modified nucleotides. In one embodiment, N_{b} is 0, 1, 2, 3, 4, 5, or 6. Each Nₐ can independently represent an oligonucleotide sequence comprising 2-20, 2-15, or 2-10 modified nucleotides.

[0279] Each of X, Y and Z may be the same or different from each other.

[0280] In other embodiments, i is 0 and j is 0, and the sense strand may be represented by the formula:

5′ nₚ-Nₐ—YYY—Nₐ-n_{q} 3′ (Ia).

[0281] When the sense strand is represented by formula (Ia), each Nₐ independently can represent an oligonucleotide sequence comprising 2-20, 2-15, or 2-10 modified nucleotides.

[0282] In one embodiment, the antisense strand sequence of the RNAi may be represented by formula (II):

5′ n_{q′}-Nₐ′—(Z′Z′Z′)ₖ—N_{b}′—Y′Y′Y′—N_{b}′—(X′X′X′)ₗ—N′ₐ-nₚ′ 3′ (II)

[0283] wherein:
[0284] k and l are each independently 0 or 1;
[0285] p′ and q′ are each independently 0-6;
[0286] each Nₐ′ independently represents an oligonucleotide sequence comprising 0-25 modified nucleotides, each sequence comprising at least two differently modified nucleotides;
[0287] each N_{b}′ independently represents an oligonucleotide sequence comprising 0-10 modified nucleotides;
[0288] each nₚ′ and n_{q}′ independently represent an overhang nucleotide;
[0289] wherein N_{b}′ and Y′ do not have the same modification; and
[0290] X′X′X′, Y′Y′Y′, and Z′Z′Z′ each independently represent one motif of three identical modifications on three consecutive nucleotides.

[0291] In some embodiments, the Nₐ′ or N_{b}′ comprises modifications of alternating pattern.

[0292] The Y′Y′Y′ motif occurs at or near the cleavage site of the antisense strand. For example, when the dsRNAi agent has a duplex region of 17-23 nucleotides in length, the Y′Y′Y′ motif can occur at positions 9, 10, 11; 10, 11, 12; 11, 12, 13; 12, 13, 14; or 13, 14, 15 of the antisense strand, with the count starting from the first nucleotide, from the 5′-end; or optionally, the count starting at the first paired nucleotide within the duplex region, from the 5′-end. In one embodiment, the Y′Y′Y′ motif occurs at positions 11, 12, 13.

[0293] In certain embodiments, Y′Y′Y′ motif is all 2′-OMe modified nucleotides.

[0294] In certain embodiments, k is 1 and l is 0, or k is 0 and l is 1, or both k and l are 1.

[0295] The antisense strand can therefore be represented by the following formulas:

5′ n_{q′}-Nₐ′—Z′Z′Z′—N_{b}′—Y′Y′Y′—Nₐ′-n_{p′} 3′ (IIb);

5′ n_{q′}-Nₐ′—Y′Y′Y′—N_{b}′—X′X′X′-n_{p′} 3′ (IIc); or

5′ n_{q′}-Nₐ′—Z′Z′Z′—N_{b}′—Y′Y′Y′—N_{b}′—X′X′X′—Nₐ′-n_{p′} 3′ (IId).

[0296] When the antisense strand is represented by formula (IIb), N_{b}′ represents an oligonucleotide sequence comprising 0-10, 0-7, 0-10, 0-7, 0-5, 0-4, 0-2, or 0 modified nucleotides. Each Nₐ′ independently represents an oligonucleotide sequence comprising 2-20, 2-15, or 2-10 modified nucleotides.

[0297] When the antisense strand is represented as formula (IIc), N_{b}′ represents an oligonucleotide sequence comprising 0-10, 0-7, 0-10, 0-7, 0-5, 0-4, 0-2, or 0 modified nucleotides. Each Nₐ′ independently represents an oligonucleotide sequence comprising 2-20, 2-15, or 2-10 modified nucleotides.

[0298] When the antisense strand is represented as formula (IId), each N_{b}′ independently represents an oligonucleotide sequence comprising 0-10, 0-7, 0-10, 0-7, 0-5, 0-4, 0-2, or 0 modified nucleotides. Each Nₐ′ independently represents an oligonucleotide sequence comprising 2-20, 2-15, or 2-10 modified nucleotides. In one embodiment, N_{b} is 0, 1, 2, 3, 4, 5, or 6.

[0299] In other embodiments, k is 0 and 1 is 0 and the antisense strand may be represented by the formula:

5′ n_{p′}-N_{a′}—Y′Y′Y′—N_{a′}-n_{q′} 3′ (Ia).

[0300] When the antisense strand is represented as formula (IIa), each Nₐ′ independently represents an oligonucleotide sequence comprising 2-20, 2-15, or 2-10 modified nucleotides.

[0301] Each of X′, Y′ and Z′ may be the same or different from each other.

[0302] Each nucleotide of the sense strand and antisense strand may be independently modified with LNA, CRN, UNA, cEt, glycol nucleic acid (GNA), hexitol nucleic acid (HNA) CeNA, 2′-methoxyethyl, 2′-O-methyl, 2′-O-allyl, 2′-C-allyl, 2′-hydroxyl, or 2′-fluoro. For example, each nucleotide of the sense strand and antisense strand is independently modified with 2′-O-methyl or 2′-fluoro. Each X, Y, Z, X′, Y′, and Z′, in particular, may represent a 2′-O-methyl modification or a 2′-fluoro modification.

[0303] In some embodiments, the sense strand of the dsRNAi agent may contain YYY motif occurring at 9, 10, and 11 positions of the strand when the duplex region is 21 nt, the count starting from the first nucleotide from the 5′-end, or optionally, the count starting at the first paired nucleotide within the duplex region, from the 5′-end; and Y represents 2′-F modification. The sense strand may additionally contain XXX motif or ZZZ motifs as wing modifications at the opposite end of the duplex region; and XXX and ZZZ each independently represents a 2′-OMe modification or 2′-F modification.

[0304] In some embodiments the antisense strand may contain Y′Y′Y′ motif occurring at positions 11, 12, 13 of the strand, the count starting from the first nucleotide from the 5′-end, or optionally, the count starting at the first paired nucleotide within the duplex region, from the 5′-end; and Y′ represents 2′-O-methyl modification. The antisense strand may additionally contain X′X′X′ motif or Z′Z′Z′ motifs as wing modifications at the opposite end of the duplex region; and X′X′X′ and Z′Z′Z′ each independently represents a 2′-OMe modification or 2′-F modification.

[0305] The sense strand represented by any one of the above formulas (Ia), (Ib), (Ic), and (Id) forms a duplex with an antisense strand being represented by any one of formulas (IIa), (IIb), (IIc), and (IId), respectively.

[0306] Accordingly, the dsRNAi agents for use in the methods of the invention may comprise a sense strand and an antisense strand, each strand having 14 to 30 nucleotides, the iRNA duplex represented by formula (III):

sense: 5′ nₚ-Nₐ—(XXX)ᵢ—N_{b}—YYY—N_{b}—(ZZZ)ⱼ—Nₐ-n_{q} 3′

antisense: 3′ nₚ′—Nₐ′—(X′X′X′)ₖ—N_{b}′—Y′Y′Y′—N_{b}′—(Z′Z′Z′)ᵢNₐ′-n_{q}′ 5′ (III)

[0307] wherein:
[0308] i, j, k, and l are each independently 0 or 1;
[0309] p, p′, q, and q′ are each independently 0-6;
[0310] each Nₐ and Nₐ′ independently represents an oligonucleotide sequence comprising 0-25 modified nucleotides, each sequence comprising at least two differently modified nucleotides; each N_{b} and N_{b}′ independently represents an oligonucleotide sequence comprising 0-10 modified nucleotides;
[0311] wherein each nₚ′, nₚ, n_{q}′, and n_{q}, each of which may or may not be present, independently represents an overhang nucleotide; and
[0312] XXX, YYY, ZZZ, X′X′X′, Y′Y′Y′, and Z′Z′Z′ each independently represent one motif of three identical modifications on three consecutive nucleotides.

[0313] In one embodiment, i is 0 and j is 0; or i is 1 and j is 0; or i is 0 and j is 1; or both i and j are 0; or both i and j are 1. In another embodiment, k is 0 and l is 0; or k is 1 and l is 0; k is 0 and l is 1; or both k and l are 0; or both k and l are 1.

[0314] Exemplary combinations of the sense strand and antisense strand forming an iRNA duplex include the formulas below:

5′ nₚ-Nₐ—YYY—Nₐ-n_{q} 3′

3′ nₚ′—Nₐ′—Y′Y′Y′—Nₐ′-n_{q}′ 5′ (IIIa)

5′ nₚ-Nₐ—YYY—N_{b}—ZZZ—Nₐ-n_{q} 3′

3′ nₚ′—Nₐ′—Y′Y′Y′—N_{b}′—Z′Z′Z′—Nₐ′-n_{q}′ 5′ (IIIb)

5′ nₚ-Nₐ—XXX—N_{b}—YYY—Nₐ-n_{q} 3′

3′ nₚ′—Nₐ′—X′X′X′—N_{b}′—Y′Y′Y′—Nₐ′-n_{q}′ 5′ (IIIc)

5′ nₚ-Nₐ—XXX—N_{b}—YYY—N_{b}—ZZZ—Nₐ-n_{q} 3′

3′ nₚ′—Nₐ′—X′X′X′—N_{b}′—Y′Y′Y′—N_{b}′—Z′Z′Z′—Nₐ-n_{q}′ 5′ (IIId)

[0315] When the dsRNAi agent is represented by formula (IIIa), each Nₐ independently represents an oligonucleotide sequence comprising 2-20, 2-15, or 2-10 modified nucleotides.

[0316] When the dsRNAi agent is represented by formula (IIIb), each N_{b} independently represents an oligonucleotide sequence comprising 1-10, 1-7, 1-5, or 1-4 modified nucleotides. Each Nₐ independently represents an oligonucleotide sequence comprising 2-20, 2-15, or 2-10 modified nucleotides.

[0317] When the dsRNAi agent is represented as formula (IIIc), each N_{b}, N_{b}′ independently represents an oligonucleotide sequence comprising 0-10, 0-7, 0-10, 0-7, 0-5, 0-4, 0-2, or 0 modified nucleotides. Each Nₐ independently represents an oligonucleotide sequence comprising 2-20, 2-15, or 2-10 modified nucleotides.

[0318] When the dsRNAi agent is represented as formula (IIId), each N_{b}, N_{b}′ independently represents an oligonucleotide sequence comprising 0-10, 0-7, 0-10, 0-7, 0-5, 0-4, 0-2, or 0 modified nucleotides. Each Nₐ, Nₐ′ independently represents an oligonucleotide sequence comprising 2-20, 2-15, or 2-10 modified nucleotides. Each of Nₐ, Nₐ′, N_{b}, and N_{b}′ independently comprises modifications of alternating pattern.

[0319] Each of X, Y, and Z in formulas (III), (IIIa), (IIIb), (IIIc), and (IIId) may be the same or different from each other.

[0320] When the dsRNAi agent is represented by formula (III), (IIIa), (IIIb), (IIIc), and (IIId), at least one of the Y nucleotides may form a base pair with one of the Y′ nucleotides. Alternatively, at least two of the Y nucleotides form base pairs with the corresponding Y′ nucleotides; or all three of the Y nucleotides all form base pairs with the corresponding Y′ nucleotides.

[0321] When the dsRNAi agent is represented by formula (IIIb) or (IIId), at least one of the Z nucleotides may form a base pair with one of the Z′ nucleotides. Alternatively, at least two of the Z nucleotides form base pairs with the corresponding Z′ nucleotides; or all three of the Z nucleotides all form base pairs with the corresponding Z′ nucleotides.

[0322] When the dsRNAi agent is represented as formula (IIIc) or (IIId), at least one of the X nucleotides may form a base pair with one of the X′ nucleotides. Alternatively, at least two of the X nucleotides form base pairs with the corresponding X′ nucleotides; or all three of the X nucleotides all form base pairs with the corresponding X′ nucleotides.

[0323] In certain embodiments, the modification on the Y nucleotide is different than the modification on the Y′ nucleotide, the modification on the Z nucleotide is different than the modification on the Z′ nucleotide, or the modification on the X nucleotide is different than the modification on the X′ nucleotide.

[0324] In certain embodiments, when the dsRNAi agent is represented by formula (IIId), the Nₐ modifications are 2′-O-methyl or 2′-fluoro modifications. In other embodiments, when the RNAi agent is represented by formula (IIId), the Nₐ modifications are 2′-O-methyl or 2′-fluoro modifications and nₚ′>0 and at least one nₚ′ is linked to a neighboring nucleotide a via phosphorothioate linkage. In yet other embodiments, when the RNAi agent is represented by formula (IIId), the Nₐ modifications are 2′-O-methyl or 2′-fluoro modifications, nₚ′>0 and at least one nₚ′ is linked to a neighboring nucleotide via phosphorothioate linkage, and the sense strand is conjugated to one or more GalNAc derivatives attached through a bivalent or trivalent branched linker (described below). In other embodiments, when the RNAi agent is represented by formula (IIId), the Nₐ modifications are 2′-O-methyl or 2′-fluoro modifications, nₚ′>0 and at least one nₚ′ is linked to a neighboring nucleotide via phosphorothioate linkage, the sense strand comprises at least one phosphorothioate linkage, and the sense strand is conjugated to one or more GalNAc derivatives attached through a bivalent or trivalent branched linker.

[0325] In some embodiments, when the dsRNAi agent is represented by formula (IIIa), the Nₐ modifications are 2′-O-methyl or 2′-fluoro modifications, nₚ′>0 and at least one nₚ′ is linked to a neighboring nucleotide via phosphorothioate linkage, the sense strand comprises at least one phosphorothioate linkage, and the sense strand is conjugated to one or more GalNAc derivatives attached through a bivalent or trivalent branched linker.

[0326] In some embodiments, the dsRNAi agent is a multimer containing at least two duplexes represented by formula (III), (IIIa), (IIIb), (IIIc), and (IIId), wherein the duplexes are connected by a linker. The linker can be cleavable or non-cleavable. Optionally, the multimer further comprises a ligand. Each of the duplexes can target the same gene or two different genes; or each of the duplexes can target same gene at two different target sites.

[0327] In some embodiments, the dsRNAi agent is a multimer containing three, four, five, six, or more duplexes represented by formula (III), (IIIa), (IIIb), (IIIc), and (IIId), wherein the duplexes are connected by a linker. The linker can be cleavable or non-cleavable. Optionally, the multimer further comprises a ligand. Each of the duplexes can target the same gene or two different genes; or each of the duplexes can target same gene at two different target sites.

[0328] In one embodiment, two dsRNAi agents represented by at least one of formulas (III), (IIIa), (IIIb), (IIIc), and (IIId) are linked to each other at the 5′ end, and one or both of the 3′ ends, and are optionally conjugated to a ligand. Each of the agents can target the same gene or two different genes; or each of the agents can target same gene at two different target sites.

[0329] In certain embodiments, an RNAi agent of the invention may contain a low number of nucleotides containing a 2′-fluoro modification, e.g., 10 or fewer nucleotides with 2′-fluoro modification. For example, the RNAi agent may contain 10, 9, 8, 7, 6, 5, 4, 3, 2, 1 or 0 nucleotides with a 2′-fluoro modification. In a specific embodiment, the RNAi agent of the invention contains 10 nucleotides with a 2′-fluoro modification, e.g., 4 nucleotides with a 2′-fluoro modification in the sense strand and 6 nucleotides with a 2′-fluoro modification in the antisense strand. In another specific embodiment, the RNAi agent of the invention contains 6 nucleotides with a 2′-fluoro modification, e.g., 4 nucleotides with a 2′-fluoro modification in the sense strand and 2 nucleotides with a 2′-fluoro modification in the antisense strand.

[0330] In other embodiments, an RNAi agent of the invention may contain an ultra low number of nucleotides containing a 2′-fluoro modification, e.g., 2 or fewer nucleotides containing a 2′-fluoro modification. For example, the RNAi agent may contain 2, 1 of 0 nucleotides with a 2′-fluoro modification. In a specific embodiment, the RNAi agent may contain 2 nucleotides with a 2′-fluoro modification, e.g., 0 nucleotides with a 2-fluoro modification in the sense strand and 2 nucleotides with a 2′-fluoro modification in the antisense strand.

[0331] Various publications describe multimeric iRNAs that can be used in the methods of the invention. Such publications include WO2007/091269, U.S. Pat. No. 7,858,769, WO2010/141511, WO2007/117686, WO2009/014887, and WO2011/031520 the entire contents of each of which are hereby incorporated herein by reference.

[0332] In certain embodiments, the compositions and methods of the disclosure include a vinyl phosphonate (VP) modification of an RNAi agent as described herein. In exemplary embodiments, a 5′-vinyl phosphonate modified nucleotide of the disclosure has the structure:

[chemical structure]

wherein X is O or S;
[0333] R is hydrogen, hydroxy, fluoro, or C₁₋₂₀alkoxy (e.g., methoxy or n-hexadecyloxy);
[0334] R^{5′} is ═C(H)—P(O)(OH)₂ and the double bond between the C5′ carbon and R^{5′} is in the E or Z orientation (e.g., E orientation); and
[0335] B is a nucleobase or a modified nucleobase, optionally where B is adenine, guanine, cytosine, thymine, or uracil.

[0336] A vinyl phosphonate of the instant disclosure may be attached to either the antisense or the sense strand of a dsRNA of the disclosure. In certain embodiments, a vinyl phosphonate of the instant disclosure is attached to the antisense strand of a dsRNA, optionally at the 5′ end of the antisense strand of the dsRNA.

[0337] Vinyl phosphate modifications are also contemplated for the compositions and methods of the instant disclosure. An exemplary vinyl phosphate structure includes the preceding structure, where R5′ is ═C(H)—OP(O)(OH)2 and the double bond between the C5′ carbon and R5′ is in the E or Z orientation (e.g., E orientation).

[0338] As described in more detail below, the iRNA that contains conjugations of one or more carbohydrate moieties to an iRNA can optimize one or more properties of the iRNA. In many cases, the carbohydrate moiety will be attached to a modified subunit of the iRNA. For example, the ribose sugar of one or more ribonucleotide subunits of an iRNA can be replaced with another moiety, e.g., a non-carbohydrate (such as, cyclic) carrier to which is attached a carbohydrate ligand. A ribonucleotide subunit in which the ribose sugar of the subunit has been so replaced is referred to herein as a ribose replacement modification subunit (RRMS). A cyclic carrier may be a carbocyclic ring system, i.e., all ring atoms are carbon atoms, or a heterocyclic ring system, i.e., one or more ring atoms may be a heteroatom, e.g., nitrogen, oxygen, sulfur. The cyclic carrier may be a monocyclic ring system, or may contain two or more rings, e.g. fused rings. The cyclic carrier may be a fully saturated ring system, or it may contain one or more double bonds.

[0339] The ligand may be attached to the polynucleotide via a carrier. The carriers include (i) at least one “backbone attachment point,” such as, two “backbone attachment points” and (ii) at least one “tethering attachment point.” A “backbone attachment point” as used herein refers to a functional group, e.g. a hydroxyl group, or generally, a bond available for, and that is suitable for incorporation of the carrier into the backbone, e.g., the phosphate, or modified phosphate, e.g., sulfur containing, backbone, of a ribonucleic acid. A “tethering attachment point” (TAP) in some embodiments refers to a constituent ring atom of the cyclic carrier, e.g., a carbon atom or a heteroatom (distinct from an atom which provides a backbone attachment point), that connects a selected moiety. The moiety can be, e.g., a carbohydrate, e.g. monosaccharide, disaccharide, trisaccharide, tetrasaccharide, oligosaccharide, or polysaccharide. Optionally, the selected moiety is connected by an intervening tether to the cyclic carrier. Thus, the cyclic carrier will often include a functional group, e.g., an amino group, or generally, provide a bond, that is suitable for incorporation or tethering of another chemical entity, e.g., a ligand to the constituent ring.

[0340] The iRNA may be conjugated to a ligand via a carrier, wherein the carrier can be cyclic group or acyclic group. In some embodiments, the cyclic group is selected from pyrrolidinyl, pyrazolinyl, pyrazolidinyl, imidazolinyl, imidazolidinyl, piperidinyl, piperazinyl, [1,3]dioxolane, oxazolidinyl, isoxazolidinyl, morpholinyl, thiazolidinyl, isothiazolidinyl, quinoxalinyl, pyridazinonyl, tetrahydrofuryl, and decalin. In some embodiments, the acyclic group is a serinol backbone or diethanolamine backbone.

[0341] i. Thermally Destabilizing Modifications

[0342] In certain embodiments, a dsRNA molecule can be optimized for RNA interference by incorporating thermally destabilizing modifications in the seed region of the antisense strand. As used herein “seed region” means at positions 2-9 of the 5′-end of the referenced strand. For example, thermally destabilizing modifications can be incorporated in the seed region of the antisense strand to reduce or inhibit off-target gene silencing.

[0343] The term “thermally destabilizing modification(s)” includes modification(s) that would result with a dsRNA with a lower overall melting temperature (Tm) than the Tm of the dsRNA without having such modification(s). For example, the thermally destabilizing modification(s) can decrease the Tm of the dsRNA by 1-4° C., such as one, two, three or four degrees Celcius. And, the term “thermally destabilizing nucleotide” refers to a nucleotide containing one or more thermally destabilizing modifications.

[0344] It has been discovered that dsRNAs with an antisense strand comprising at least one thermally destabilizing modification of the duplex within the first 9 nucleotide positions, counting from the 5′ end, of the antisense strand have reduced off-target gene silencing activity. Accordingly, in some embodiments, the antisense strand comprises at least one (e.g., one, two, three, four, five or more) thermally destabilizing modification of the duplex within the first 9 nucleotide positions of the 5′ region of the antisense strand. In some embodiments, one or more thermally destabilizing modification(s) of the duplex is/are located in positions 2-9, such as, positions 4-8, from the 5′-end of the antisense strand. In some further embodiments, the thermally destabilizing modification(s) of the duplex is/are located at position 6, 7 or 8 from the 5′-end of the antisense strand. In still some further embodiments, the thermally destabilizing modification of the duplex is located at position 7 from the 5′-end of the antisense strand. In some embodiments, the thermally destabilizing modification of the duplex is located at position 2, 3, 4, 5 or 9 from the 5′-end of the antisense strand.

[0345] The thermally destabilizing modifications can include, but are not limited to, abasic modification; mismatch with the opposing nucleotide in the opposing strand; and sugar modification such as 2′-deoxy modification or acyclic nucleotide, e.g., unlocked nucleic acids (UNA) or glycol nucleic acid (GNA).

[0346] An iRNA agent comprises a sense strand and an antisense strand, each strand having 14 to 40 nucleotides. The RNAi agent may be represented by formula (L):

[chemical structure]

In formula (L), B1, B2, B3, B1′, B2′, B3′, and B4′ each are independently a nucleotide containing a modification selected from the group consisting of 2′-O-alkyl, 2′-substituted alkoxy, 2′-substituted alkyl, 2′-halo, ENA, and BNA/LNA. In one embodiment, B1, B2, B3, B1′, B2′, B3′, and B4′ each contain 2′-OMe modifications. In one embodiment, B1, B2, B3, B1′, B2′, B3′, and B4′ each contain 2′-OMe or 2′-F modifications. In one embodiment, at least one of B1, B2, B3, B1′, B2′, B3′, and B4′ contain 2′-O—N-methylacetamido (2′-O-NMA) modification.

[0347] C1 is a thermally destabilizing nucleotide placed at a site opposite to the seed region of the antisense strand (i.e., at positions 2-8 of the 5′-end of the antisense strand). For example, C1 is at a position of the sense strand that pairs with a nucleotide at positions 2-8 of the 5′-end of the antisense strand. In one example, C1 is at position 15 from the 5′-end of the sense strand. C1 nucleotide bears the thermally destabilizing modification which can include abasic modification; mismatch with the opposing nucleotide in the duplex; and sugar modification such as 2′-deoxy modification or acyclic nucleotide e.g., unlocked nucleic acids (UNA) or glycerol nucleic acid (GNA). In one embodiment, C1 has thermally destabilizing modification selected from the group consisting of: i) mismatch with the opposing nucleotide in the antisense strand; ii) abasic modification selected from the group consisting of:

[chemical structure]

and iii) sugar modification selected from the group consisting of:

[chemical structure]

wherein B is a modified or unmodified nucleobase, R¹ and R² independently are H, halogen, OR₃, or alkyl; and R₃ is H, alkyl, cycloalkyl, aryl, aralkyl, heteroaryl or sugar. In one embodiment, the thermally destabilizing modification in C1 is a mismatch selected from the group consisting of G:G, G:A, G:U, G:T, A:A, A:C, C:C, C:U, C:T, U:U, T:T, and U:T; and optionally, at least one nucleobase in the mismatch pair is a 2′-deoxy nucleobase. In one example, the thermally destabilizing modification in C1 is GNA or

[chemical structure]

[0348] T1, T1′, T2′, and T3′ each independently represent a nucleotide comprising a modification providing the nucleotide a steric bulk that is less or equal to the steric bulk of a 2′-OMe modification. A steric bulk refers to the sum of steric effects of a modification. Methods for determining steric effects of a modification of a nucleotide are known to one skilled in the art. The modification can be at the 2′ position of a ribose sugar of the nucleotide, or a modification to a non-ribose nucleotide, acyclic nucleotide, or the backbone of the nucleotide that is similar or equivalent to the 2′ position of the ribose sugar, and provides the nucleotide a steric bulk that is less than or equal to the steric bulk of a 2′-OMe modification. For example, T1, T1′, T2′, and T3′ are each independently selected from DNA, RNA, LNA, 2′-F, and 2′-F-5′-methyl. In one embodiment, T1 is DNA. In one embodiment, T1′ is DNA, RNA or LNA. In one embodiment, T2′ is DNA or RNA. In one embodiment, T3′ is DNA or RNA.

[0349] n¹, n³, and q¹ are independently 4 to 15 nucleotides in length.

[0350] n⁵, q³, and q⁷ are independently 1-6 nucleotide(s) in length.

[0351] n⁴, q², and q⁶ are independently 1-3 nucleotide(s) in length; alternatively, n⁴ is 0.

[0352] q⁵ is independently 0-10 nucleotide(s) in length.

[0353] n² and q⁴ are independently 0-3 nucleotide(s) in length.

[0354] Alternatively, n⁴ is 0-3 nucleotide(s) in length.

[0355] In one embodiment, n⁴ can be 0. In one example, n⁴ is 0, and q² and q⁶ are 1. In another example, n⁴ is 0, and q² and q⁶ are 1, with two phosphorothioate internucleotide linkage modifications within position 1-5 of the sense strand (counting from the 5′-end of the sense strand), and two phosphorothioate internucleotide linkage modifications at positions 1 and 2 and two phosphorothioate internucleotide linkage modifications within positions 18-23 of the antisense strand (counting from the 5′-end of the antisense strand).

[0356] In one embodiment, n⁴, q², and q⁶ are each 1.

[0357] In one embodiment, n², n⁴, q², q⁴, and q⁶ are each 1.

[0358] In one embodiment, C1 is at position 14-17 of the 5′-end of the sense strand, when the sense strand is 19-22 nucleotides in length, and n⁴ is 1. In one embodiment, C1 is at position 15 of the 5′-end of the sense strand

[0359] In one embodiment, T3′ starts at position 2 from the 5′ end of the antisense strand. In one example, T3′ is at position 2 from the 5′ end of the antisense strand and q⁶ is equal to 1.

[0360] In one embodiment, T1′ starts at position 14 from the 5′ end of the antisense strand. In one example, T1′ is at position 14 from the 5′ end of the antisense strand and q² is equal to 1.

[0361] In an exemplary embodiment, T3′ starts from position 2 from the 5′ end of the antisense strand and T1′ starts from position 14 from the 5′ end of the antisense strand. In one example, T3′ starts from position 2 from the 5′ end of the antisense strand and q⁶ is equal to 1 and T1′ starts from position 14 from the 5′ end of the antisense strand and q² is equal to 1.

[0362] In one embodiment, T1′ and T3′ are separated by 11 nucleotides in length (i.e. not counting the T1′ and T3′ nucleotides).

[0363] In one embodiment, T1′ is at position 14 from the 5′ end of the antisense strand. In one example, T1′ is at position 14 from the 5′ end of the antisense strand and q² is equal to 1, and the modification at the 2′ position or positions in a non-ribose, acyclic or backbone that provide less steric bulk than a 2′-OMe ribose.

[0364] In one embodiment, T3′ is at position 2 from the 5′ end of the antisense strand. In one example, T3′ is at position 2 from the 5′ end of the antisense strand and q⁶ is equal to 1, and the modification at the 2′ position or positions in a non-ribose, acyclic or backbone that provide less than or equal to steric bulk than a 2′-OMe ribose.

[0365] In one embodiment, T1 is at the cleavage site of the sense strand. In one example, T1 is at position 11 from the 5′ end of the sense strand, when the sense strand is 19-22 nucleotides in length, and n² is 1. In an exemplary embodiment, T1 is at the cleavage site of the sense strand at position 11 from the 5′ end of the sense strand, when the sense strand is 19-22 nucleotides in length, and n² is 1,

[0366] In one embodiment, T2′ starts at position 6 from the 5′ end of the antisense strand. In one example, T2′ is at positions 6-10 from the 5′ end of the antisense strand, and q⁴ is 1.

[0367] In an exemplary embodiment, T1 is at the cleavage site of the sense strand, for instance, at position 11 from the 5′ end of the sense strand, when the sense strand is 19-22 nucleotides in length, and n² is 1; T1′ is at position 14 from the 5′ end of the antisense strand, and q² is equal to 1, and the modification to T1′ is at the 2′ position of a ribose sugar or at positions in a non-ribose, acyclic or backbone that provide less steric bulk than a 2′-OMe ribose; T2′ is at positions 6-10 from the 5′ end of the antisense strand, and q⁴ is 1; and T3′ is at position 2 from the 5′ end of the antisense strand, and q⁶ is equal to 1, and the modification to T3′ is at the 2′ position or at positions in a non-ribose, acyclic or backbone that provide less than or equal to steric bulk than a 2′-OMe ribose.

[0368] In one embodiment, T2′ starts at position 8 from the 5′ end of the antisense strand. In one example, T2′ starts at position 8 from the 5′ end of the antisense strand, and q⁴ is 2.

[0369] In one embodiment, T2′ starts at position 9 from the 5′ end of the antisense strand. In one example, T2′ is at position 9 from the 5′ end of the antisense strand, and q⁴ is 1.

[0370] In one embodiment, B1′ is 2′-OMe or 2′-F, q¹ is 9, T1′ is 2′-F, q² is 1, B2′ is 2′-OMe or 2′-F, q³ is 4, T2′ is 2′-F, q⁴ is 1, B3′ is 2′-OMe or 2′-F, q⁵ is 6, T3′ is 2′-F, q⁶ is 1, B4′ is 2′-OMe, and q⁷ is 1; with two phosphorothioate internucleotide linkage modifications within positions 1-5 of the sense strand (counting from the 5′-end of the sense strand), and two phosphorothioate internucleotide linkage modifications at positions 1 and 2 and two phosphorothioate internucleotide linkage modifications within positions 18-23 of the antisense strand (counting from the 5′-end of the antisense strand).

[0371] In one embodiment, n⁴ is 0, B3 is 2′-OMe, n⁵ is 3, B1′ is 2′-OMe or 2′-F, q¹ is 9, T1′ is 2′-F, q² is 1, B2′ is 2′-OMe or 2′-F, q³ is 4, T2′ is 2′-F, q⁴ is 1, B3′ is 2′-OMe or 2′-F, q⁵ is 6, T3′ is 2′-F, q⁶ is 1, B4′ is 2′-OMe, and q⁷ is 1; with two phosphorothioate internucleotide linkage modifications within positions 1-5 of the sense strand (counting from the 5′-end of the sense strand), and two phosphorothioate internucleotide linkage modifications at positions 1 and 2 and two phosphorothioate internucleotide linkage modifications within positions 18-23 of the antisense strand (counting from the 5′-end of the antisense strand).

[0372] In one embodiment, B1 is 2′-OMe or 2′-F, n¹ is 8, T1 is 2′F, n² is 3, B2 is 2′-OMe, n³ is 7, n⁴ is 0, B3 is 2′OMe, n⁵ is 3, B1′ is 2′-OMe or 2′-F, q¹ is 9, T1′ is 2′-F, q² is 1, B2′ is 2′-OMe or 2′-F, q³ is 4, T2′ is 2′-F, q⁴ is 2, B3′ is 2′-OMe or 2′-F, q⁵ is 5, T3′ is 2′-F, q⁶ is 1, B4′ is 2′-OMe, and q⁷ is 1.

[0373] In one embodiment, B1 is 2′-OMe or 2′-F, n¹ is 8, T1 is 2′F, n² is 3, B2 is 2′-OMe, n³ is 7, n⁴ is 0, B3 is 2′-OMe, n⁵ is 3, B1′ is 2′-OMe or 2′-F, q¹ is 9, T1′ is 2′-F, q² is 1, B2′ is 2′-OMe or 2′-F, q³ is 4, T2′ is 2′-F, q⁴ is 2, B3′ is 2′-OMe or 2′-F, q⁵ is 5, T3′ is 2′-F, q⁶ is 1, B4′ is 2′-OMe, and q⁷ is 1; with two phosphorothioate internucleotide linkage modifications within positions 1-5 of the sense strand (counting from the 5′-end of the sense strand), and two phosphorothioate internucleotide linkage modifications at positions 1 and 2 and two phosphorothioate internucleotide linkage modifications within positions 18-23 of the antisense strand (counting from the 5′-end of the antisense strand).

[0374] In one embodiment, B1 is 2′-OMe or 2′-F, n¹ is 6, T1 is 2′F, n² is 3, B2 is 2′-OMe, n³ is 7, n⁴ is 0, B3 is 2′OMe, n⁵ is 3, B1′ is 2′-OMe or 2′-F, q¹ is 7, T1′ is 2′-F, q² is 1, B2′ is 2′-OMe or 2′-F, q³ is 4, T2′ is 2′-F, q⁴ is 2, B3′ is 2′-OMe or 2′-F, q⁵ is 5, T3′ is 2′-F, q⁶ is 1, B4′ is 2′-OMe, and q⁷ is 1.

[0375] In one embodiment, B1 is 2′-OMe or 2′-F, n¹ is 6, T1 is 2′F, n² is 3, B2 is 2′-OMe, n³ is 7, n⁴ is 0, B3 is 2′-OMe, n⁵ is 3, B1′ is 2′-OMe or 2′-F, q¹ is 7, T1′ is 2′-F, q² is 1, B2′ is 2′-OMe or 2′-F, q³ is 4, T2′ is 2′-F, q⁴ is 2, B3′ is 2′-OMe or 2′-F, q⁵ is 5, T3′ is 2′-F, q⁶ is 1, B4′ is 2′-OMe, and q⁷ is 1; with two phosphorothioate internucleotide linkage modifications within positions 1-5 of the sense strand (counting from the 5′-end of the sense strand), and two phosphorothioate internucleotide linkage modifications at positions 1 and 2 and two phosphorothioate internucleotide linkage modifications within positions 18-23 of the antisense strand (counting from the 5′-end of the antisense strand).

[0376] In one embodiment, B1 is 2′-OMe or 2′-F, n¹ is 8, T1 is 2′F, n² is 3, B2 is 2′-OMe, n³ is 7, n⁴ is 0, B3 is 2′OMe, n⁵ is 3, B1′ is 2′-OMe or 2′-F, q¹ is 9, T1′ is 2′-F, q² is 1, B2′ is 2′-OMe or 2′-F, q³ is 4, T2′ is 2′-F, q⁴ is 1, B3′ is 2′-OMe or 2′-F, q⁵ is 6, T3′ is 2′-F, q⁶ is 1, B4′ is 2′-OMe, and q⁷ is 1.

[0377] In one embodiment, B1 is 2′-OMe or 2′-F, n¹ is 8, T1 is 2′F, n² is 3, B2 is 2′-OMe, n³ is 7, n⁴ is 0, B3 is 2′-OMe, n⁵ is 3, B1′ is 2′-OMe or 2′-F, q¹ is 9, T1′ is 2′-F, q² is 1, B2′ is 2′-OMe or 2′-F, q³ is 4, T2′ is 2′-F, q⁴ is 1, B3′ is 2′-OMe or 2′-F, q⁵ is 6, T3′ is 2′-F, q⁶ is 1, B4′ is 2′-OMe, and q⁷ is 1; with two phosphorothioate internucleotide linkage modifications within positions 1-5 of the sense strand (counting from the 5′-end of the sense strand), and two phosphorothioate internucleotide linkage modifications at positions 1 and 2 and two phosphorothioate internucleotide linkage modifications within positions 18-23 of the antisense strand (counting from the 5′-end of the antisense strand).

[0378] In one embodiment, B1 is 2′-OMe or 2′-F, n¹ is 8, T1 is 2′F, n² is 3, B2 is 2′-OMe, n³ is 7, n⁴ is 0, B3 is 2′OMe, n⁵ is 3, B1′ is 2′-OMe or 2′-F, q¹ is 9, T1′ is 2′-F, q² is 1, B2′ is 2′-OMe or 2′-F, q³ is 5, T2′ is 2′-F, q⁴ is 1, B3′ is 2′-OMe or 2′-F, q⁵ is 5, T3′ is 2′-F, q⁶ is 1, B4′ is 2′-OMe, and q⁷ is 1; optionally with at least 2 additional TT at the 3′-end of the antisense strand.

[0379] In one embodiment, B1 is 2′-OMe or 2′-F, n¹ is 8, T1 is 2′F, n² is 3, B2 is 2′-OMe, n³ is 7, n⁴ is 0, B3 is 2′-OMe, n⁵ is 3, B1′ is 2′-OMe or 2′-F, q¹ is 9, T1′ is 2′-F, q² is 1, B2′ is 2′-OMe or 2′-F, q³ is 5, T2′ is 2′-F, q⁴ is 1, B3′ is 2′-OMe or 2′-F, q⁵ is 5, T3′ is 2′-F, q⁶ is 1, B4′ is 2′-OMe, and q⁷ is 1; optionally with at least 2 additional TT at the 3′-end of the antisense strand; with two phosphorothioate internucleotide linkage modifications within positions 1-5 of the sense strand (counting from the 5′-end of the sense strand), and two phosphorothioate internucleotide linkage modifications at positions 1 and 2 and two phosphorothioate internucleotide linkage modifications within positions 18-23 of the antisense strand (counting from the 5′-end of the antisense strand).

[0380] In one embodiment, B1 is 2′-OMe or 2′-F, n¹ is 8, T1 is 2′F, n² is 3, B2 is 2′-OMe, n³ is 7, n⁴ is 0, B3 is 2′-OMe, n⁵ is 3, B1′ is 2′-OMe or 2′-F, q¹ is 9, T1′ is 2′-F, q² is 1, B2′ is 2′-OMe or 2′-F, q³ is 4, q⁴ is 0, B3′ is 2′-OMe or 2′-F, q⁵ is 7, T3′ is 2′-F, q⁶ is 1, B4′ is 2′-OMe, and q⁷ is 1.

[0381] In one embodiment, B1 is 2′-OMe or 2′-F, n¹ is 8, T1 is 2′F, n² is 3, B2 is 2′-OMe, n³ is 7, n⁴ is 0, B3 is 2′-OMe, n⁵ is 3, B1′ is 2′-OMe or 2′-F, q¹ is 9, T1′ is 2′-F, q² is 1, B2′ is 2′-OMe or 2′-F, q³ is 4, q⁴ is 0, B3′ is 2′-OMe or 2′-F, q⁵ is 7, T3′ is 2′-F, q⁶ is 1, B4′ is 2′-OMe, and q⁷ is 1; with two phosphorothioate internucleotide linkage modifications within positions 1-5 of the sense strand (counting from the 5′-end), and two phosphorothioate internucleotide linkage modifications at positions 1 and 2 and two phosphorothioate internucleotide linkage modifications within positions 18-23 of the antisense strand (counting from the 5′-end).

[0382] In one embodiment, B1 is 2′-OMe or 2′-F, n¹ is 8, T1 is 2′F, n² is 3, B2 is 2′-OMe, n³ is 7, n⁴ is 0, B3 is 2′OMe, n⁵ is 3, B1′ is 2′-OMe or 2′-F, q¹ is 9, T1′ is 2′-F, q² is 1, B2′ is 2′-OMe or 2′-F, q³ is 4, T2′ is 2′-F, q⁴ is 2, B3′ is 2′-OMe or 2′-F, q⁵ is 5, T3′ is 2′-F, q⁶ is 1, B4′ is 2′-F, and q⁷ is 1.

[0383] In one embodiment, B1 is 2′-OMe or 2′-F, n¹ is 8, T1 is 2′F, n² is 3, B2 is 2′-OMe, n³ is 7, n⁴ is 0, B3 is 2′-OMe, n⁵ is 3, B1′ is 2′-OMe or 2′-F, q¹ is 9, T1′ is 2′-F, q² is 1, B2′ is 2′-OMe or 2′-F, q³ is 4, T2′ is 2′-F, q⁴ is 2, B3′ is 2′-OMe or 2′-F, q⁵ is 5, T3′ is 2′-F, q⁶ is 1, B4′ is 2′-F, and q⁷ is 1; with two phosphorothioate internucleotide linkage modifications within positions 1-5 of the sense strand (counting from the 5′-end of the sense strand), and two phosphorothioate internucleotide linkage modifications at positions 1 and 2 and two phosphorothioate internucleotide linkage modifications within positions 18-23 of the antisense strand (counting from the 5′-end of the antisense strand).

[0384] In one embodiment, B1 is 2′-OMe or 2′-F, n¹ is 8, T1 is 2′F, n² is 3, B2 is 2′-OMe, n³ is 7, n⁴ is 0, B3 is 2′-OMe, n⁵ is 3, B1′ is 2′-OMe or 2′-F, q¹ is 9, T1′ is 2′-F, q² is 1, B2′ is 2′-OMe or 2′-F, q³ is 4, q⁴ is 0, B3′ is 2′-OMe or 2′-F, q⁵ is 7, T3′ is 2′-F, q⁶ is 1, B4′ is 2′-F, and q⁷ is 1.

[0385] In one embodiment, B1 is 2′-OMe or 2′-F, n¹ is 8, T1 is 2′F, n² is 3, B2 is 2′-OMe, n³ is 7, n⁴ is 0, B3 is 2′-OMe, n⁵ is 3, B1′ is 2′-OMe or 2′-F, q¹ is 9, T1′ is 2′-F, q² is 1, B2′ is 2′-OMe or 2′-F, q³ is 4, q⁴ is 0, B3′ is 2′-OMe or 2′-F, q⁵ is 7, T3′ is 2′-F, q⁶ is 1, B4′ is 2′-F, and q⁷ is 1; with two phosphorothioate internucleotide linkage modifications within positions 1-5 of the sense strand (counting from the 5′-end of the sense strand), and two phosphorothioate internucleotide linkage modifications at positions 1 and 2 and two phosphorothioate internucleotide linkage modifications within positions 18-23 of the antisense strand (counting from the 5′-end of the antisense strand).

[0386] The RNAi agent can comprise a phosphorus-containing group at the 5′-end of the sense strand or antisense strand. The 5′-end phosphorus-containing group can be 5′-end phosphate (5′-P), 5′-end phosphorothioate (5′-PS), 5′-end phosphorodithioate (5′-PS₂), 5′-end vinylphosphonate (5′-VP), 5′-end methylphosphonate (MePhos), or 5′-deoxy-5′-C-malonyl

[chemical structure]

When the 5′-end phosphorus-containing group is 5′-end vinylphosphonate (5′-VP), the 5′-VP can be either 5′-E-VP isomer (i.e., trans-vinylphosphate,

[chemical structure]

5′-Z-VP isomer (i.e., cis-vinylphosphate,

[chemical structure]

or mixtures thereof.

[0387] In one embodiment, the RNAi agent comprises a phosphorus-containing group at the 5′-end of the sense strand. In one embodiment, the RNAi agent comprises a phosphorus-containing group at the 5′-end of the antisense strand.

[0388] In one embodiment, the RNAi agent comprises a 5′-P. In one embodiment, the RNAi agent comprises a 5′-P in the antisense strand.

[0389] In one embodiment, the RNAi agent comprises a 5′-PS. In one embodiment, the RNAi agent comprises a 5′-PS in the antisense strand.

[0390] In one embodiment, the RNAi agent comprises a 5′-VP. In one embodiment, the RNAi agent comprises a 5′-VP in the antisense strand. In one embodiment, the RNAi agent comprises a 5′-E-VP in the antisense strand. In one embodiment, the RNAi agent comprises a 5′-Z-VP in the antisense strand.

[0391] In one embodiment, the RNAi agent comprises a 5′-PS₂. In one embodiment, the RNAi agent comprises a 5′-PS₂ in the antisense strand.

[0392] In one embodiment, the RNAi agent comprises a 5′-PS₂. In one embodiment, the RNAi agent comprises a 5′-deoxy-5′-C-malonyl in the antisense strand.

[0393] In one embodiment, B1 is 2′-OMe or 2′-F, n¹ is 8, T1 is 2′F, n² is 3, B2 is 2′-OMe, n³ is 7, n⁴ is 0, B3 is 2′OMe, n⁵ is 3, B1′ is 2′-OMe or 2′-F, q¹ is 9, T1′ is 2′-F, q² is 1, B2′ is 2′-OMe or 2′-F, q³ is 4, T2′ is 2′-F, q⁴ is 2, B3′ is 2′-OMe or 2′-F, q⁵ is 5, T3′ is 2′-F, q⁶ is 1, B4′ is 2′-OMe, and q⁷ is 1. The RNAi agent also comprises a 5′-PS.

[0394] In one embodiment, B1 is 2′-OMe or 2′-F, n¹ is 8, T1 is 2′F, n² is 3, B2 is 2′-OMe, n³ is 7, n⁴ is 0, B3 is 2′OMe, n⁵ is 3, B1′ is 2′-OMe or 2′-F, q¹ is 9, T1′ is 2′-F, q² is 1, B2′ is 2′-OMe or 2′-F, q³ is 4, T2′ is 2′-F, q⁴ is 2, B3′ is 2′-OMe or 2′-F, q⁵ is 5, T3′ is 2′-F, q⁶ is 1, B4′ is 2′-OMe, and q⁷ is 1. The RNAi agent also comprises a 5′-P.

[0395] In one embodiment, B1 is 2′-OMe or 2′-F, n¹ is 8, T1 is 2′F, n² is 3, B2 is 2′-OMe, n³ is 7, n⁴ is 0, B3 is 2′OMe, n⁵ is 3, B1′ is 2′-OMe or 2′-F, q¹ is 9, T1′ is 2′-F, q² is 1, B2′ is 2′-OMe or 2′-F, q³ is 4, T2′ is 2′-F, q⁴ is 2, B3′ is 2′-OMe or 2′-F, q⁵ is 5, T3′ is 2′-F, q⁶ is 1, B4′ is 2′-OMe, and q⁷ is 1. The RNAi agent also comprises a 5′-VP. The 5′-VP may be 5′-E-VP, 5′-Z-VP, or combination thereof.

[0396] In one embodiment, B1 is 2′-OMe or 2′-F, n¹ is 8, T1 is 2′F, n² is 3, B2 is 2′-OMe, n³ is 7, n⁴ is 0, B3 is 2′OMe, n⁵ is 3, B1′ is 2′-OMe or 2′-F, q¹ is 9, T1′ is 2′-F, q² is 1, B2′ is 2′-OMe or 2′-F, q³ is 4, T2′ is 2′-F, q⁴ is 2, B3′ is 2′-OMe or 2′-F, q⁵ is 5, T3′ is 2′-F, q⁶ is 1, B4′ is 2′-OMe, and q⁷ is 1. The RNAi agent also comprises a 5′-PS₂.

[0397] In one embodiment, B1 is 2′-OMe or 2′-F, n¹ is 8, T1 is 2′F, n² is 3, B2 is 2′-OMe, n³ is 7, n⁴ is 0, B3 is 2′OMe, n⁵ is 3, B1′ is 2′-OMe or 2′-F, q¹ is 9, T1′ is 2′-F, q² is 1, B2′ is 2′-OMe or 2′-F, q³ is 4, T2′ is 2′-F, q⁴ is 2, B3′ is 2′-OMe or 2′-F, q⁵ is 5, T3′ is 2′-F, q⁶ is 1, B4′ is 2′-OMe, and q⁷ is 1. The RNAi agent also comprises a 5′-deoxy-5′-C-malonyl.

[0398] In one embodiment, B1 is 2′-OMe or 2′-F, n¹ is 8, T1 is 2′F, n² is 3, B2 is 2′-OMe, n³ is 7, n⁴ is 0, B3 is 2′-OMe, n⁵ is 3, B1′ is 2′-OMe or 2′-F, q¹ is 9, T1′ is 2′-F, q² is 1, B2′ is 2′-OMe or 2′-F, q³ is 4, T2′ is 2′-F, q⁴ is 2, B3′ is 2′-OMe or 2′-F, q⁵ is 5, T3′ is 2′-F, q⁶ is 1, B4′ is 2′-OMe, and q⁷ is 1; with two phosphorothioate internucleotide linkage modifications within position 1-5 of the sense strand (counting from the 5′-end of the sense strand), and two phosphorothioate internucleotide linkage modifications at positions 1 and 2 and two phosphorothioate internucleotide linkage modifications within positions 18-23 of the antisense strand (counting from the 5′-end of the antisense strand). The RNAi agent also comprises a 5′-P.

[0399] In one embodiment, B1 is 2′-OMe or 2′-F, n¹ is 8, T1 is 2′F, n² is 3, B2 is 2′-OMe, n³ is 7, n⁴ is 0, B3 is 2′-OMe, n⁵ is 3, B1′ is 2′-OMe or 2′-F, q¹ is 9, T1′ is 2′-F, q² is 1, B2′ is 2′-OMe or 2′-F, q³ is 4, T2′ is 2′-F, q⁴ is 2, B3′ is 2′-OMe or 2′-F, q⁵ is 5, T3′ is 2′-F, q⁶ is 1, B4′ is 2′-OMe, and q⁷ is 1; with two phosphorothioate internucleotide linkage modifications within position 1-5 of the sense strand (counting from the 5′-end of the sense strand), and two phosphorothioate internucleotide linkage modifications at positions 1 and 2 and two phosphorothioate internucleotide linkage modifications within positions 18-23 of the antisense strand (counting from the 5′-end of the antisense strand). The RNAi agent also comprises a 5′-PS.

[0400] In one embodiment, B1 is 2′-OMe or 2′-F, n¹ is 8, T1 is 2′F, n² is 3, B2 is 2′-OMe, n³ is 7, n⁴ is 0, B3 is 2′-OMe, n⁵ is 3, B1′ is 2′-OMe or 2′-F, q¹ is 9, T1′ is 2′-F, q² is 1, B2′ is 2′-OMe or 2′-F, q³ is 4, T2′ is 2′-F, q⁴ is 2, B3′ is 2′-OMe or 2′-F, q⁵ is 5, T3′ is 2′-F, q⁶ is 1, B4′ is 2′-OMe, and q⁷ is 1; with two phosphorothioate internucleotide linkage modifications within position 1-5 of the sense strand (counting from the 5′-end of the sense strand), and two phosphorothioate internucleotide linkage modifications at positions 1 and 2 and two phosphorothioate internucleotide linkage modifications within positions 18-23 of the antisense strand (counting from the 5′-end of the antisense strand). The RNAi agent also comprises a 5′-VP. The 5′-VP may be 5′-E-VP, 5′-Z-VP, or combination thereof.

[0401] In one embodiment, B1 is 2′-OMe or 2′-F, n¹ is 8, T1 is 2′F, n² is 3, B2 is 2′-OMe, n³ is 7, n⁴ is 0, B3 is 2′-OMe, n⁵ is 3, B1′ is 2′-OMe or 2′-F, q¹ is 9, T1′ is 2′-F, q² is 1, B2′ is 2′-OMe or 2′-F, q³ is 4, T2′ is 2′-F, q⁴ is 2, B3′ is 2′-OMe or 2′-F, q⁵ is 5, T3′ is 2′-F, q⁶ is 1, B4′ is 2′-OMe, and q⁷ is 1; with two phosphorothioate internucleotide linkage modifications within position 1-5 of the sense strand (counting from the 5′-end of the sense strand), and two phosphorothioate internucleotide linkage modifications at positions 1 and 2 and two phosphorothioate internucleotide linkage modifications within positions 18-23 of the antisense strand (counting from the 5′-end of the antisense strand). The RNAi agent also comprises a 5′-PS₂.

[0402] In one embodiment, B1 is 2′-OMe or 2′-F, n¹ is 8, T1 is 2′F, n² is 3, B2 is 2′-OMe, n³ is 7, n⁴ is 0, B3 is 2′-OMe, n⁵ is 3, B1′ is 2′-OMe or 2′-F, q¹ is 9, T1′ is 2′-F, q² is 1, B2′ is 2′-OMe or 2′-F, q³ is 4, T2′ is 2′-F, q⁴ is 2, B3′ is 2′-OMe or 2′-F, q⁵ is 5, T3′ is 2′-F, q⁶ is 1, B4′ is 2′-OMe, and q⁷ is 1; with two phosphorothioate internucleotide linkage modifications within position 1-5 of the sense strand (counting from the 5′-end of the sense strand), and two phosphorothioate internucleotide linkage modifications at positions 1 and 2 and two phosphorothioate internucleotide linkage modifications within positions 18-23 of the antisense strand (counting from the 5′-end of the antisense strand). The RNAi agent also comprises a 5′-deoxy-5′-C-malonyl.

[0403] In one embodiment, B1 is 2′-OMe or 2′-F, n¹ is 8, T1 is 2′F, n² is 3, B2 is 2′-OMe, n³ is 7, n⁴ is 0, B3 is 2′-OMe, n⁵ is 3, B1′ is 2′-OMe or 2′-F, q¹ is 9, T1′ is 2′-F, q² is 1, B2′ is 2′-OMe or 2′-F, q³ is 4, q⁴ is 0, B3′ is 2′-OMe or 2′-F, q⁵ is 7, T3′ is 2′-F, q⁶ is 1, B4′ is 2′-OMe, and q⁷ is 1. The RNAi agent also comprises a 5′-P.

[0404] In one embodiment, B1 is 2′-OMe or 2′-F, n¹ is 8, T1 is 2′F, n² is 3, B2 is 2′-OMe, n³ is 7, n⁴ is 0, B3 is 2′-OMe, n⁵ is 3, B1′ is 2′-OMe or 2′-F, q¹ is 9, T1′ is 2′-F, q² is 1, B2′ is 2′-OMe or 2′-F, q³ is 4, q⁴ is 0, B3′ is 2′-OMe or 2′-F, q⁵ is 7, T3′ is 2′-F, q⁶ is 1, B4′ is 2′-OMe, and q⁷ is 1. The dsRNA agent also comprises a 5′-PS.

[0405] In one embodiment, B1 is 2′-OMe or 2′-F, n¹ is 8, T1 is 2′F, n² is 3, B2 is 2′-OMe, n³ is 7, n⁴ is 0, B3 is 2′-OMe, n⁵ is 3, B1′ is 2′-OMe or 2′-F, q¹ is 9, T1′ is 2′-F, q² is 1, B2′ is 2′-OMe or 2′-F, q³ is 4, q⁴ is 0, B3′ is 2′-OMe or 2′-F, q⁵ is 7, T3′ is 2′-F, q⁶ is 1, B4′ is 2′-OMe, and q⁷ is 1. The RNAi agent also comprises a 5′-VP. The 5′-VP may be 5′-E-VP, 5′-Z-VP, or combination thereof.

[0406] In one embodiment, B1 is 2′-OMe or 2′-F, n¹ is 8, T1 is 2′F, n² is 3, B2 is 2′-OMe, n³ is 7, n⁴ is 0, B3 is 2′-OMe, n⁵ is 3, B1′ is 2′-OMe or 2′-F, q¹ is 9, T1′ is 2′-F, q² is 1, B2′ is 2′-OMe or 2′-F, q³ is 4, q⁴ is 0, B3′ is 2′-OMe or 2′-F, q⁵ is 7, T3′ is 2′-F, q⁶ is 1, B4′ is 2′-OMe, and q⁷ is 1. The RNAi agent also comprises a 5′-PS₂.

[0407] In one embodiment, B1 is 2′-OMe or 2′-F, n¹ is 8, T1 is 2′F, n² is 3, B2 is 2′-OMe, n³ is 7, n⁴ is 0, B3 is 2′-OMe, n⁵ is 3, B1′ is 2′-OMe or 2′-F, q¹ is 9, T1′ is 2′-F, q² is 1, B2′ is 2′-OMe or 2′-F, q³ is 4, q⁴ is 0, B3′ is 2′-OMe or 2′-F, q⁵ is 7, T3′ is 2′-F, q⁶ is 1, B4′ is 2′-OMe, and q⁷ is 1. The RNAi agent also comprises a 5′-deoxy-5′-C-malonyl.

[0408] In one embodiment, B1 is 2′-OMe or 2′-F, n¹ is 8, T1 is 2′F, n² is 3, B2 is 2′-OMe, n³ is 7, n⁴ is 0, B3 is 2′-OMe, n⁵ is 3, B1′ is 2′-OMe or 2′-F, q¹ is 9, T1′ is 2′-F, q² is 1, B2′ is 2′-OMe or 2′-F, q³ is 4, q⁴ is 0, B3′ is 2′-OMe or 2′-F, q⁵ is 7, T3′ is 2′-F, q⁶ is 1, B4′ is 2′-OMe, and q⁷ is 1; with two phosphorothioate internucleotide linkage modifications within position 1-5 of the sense strand (counting from the 5′-end), and two phosphorothioate internucleotide linkage modifications at positions 1 and 2 and two phosphorothioate internucleotide linkage modifications within positions 18-23 of the antisense strand (counting from the 5′-end). The RNAi agent also comprises a 5′-P.

[0409] In one embodiment, B1 is 2′-OMe or 2′-F, n¹ is 8, T1 is 2′F, n² is 3, B2 is 2′-OMe, n³ is 7, n⁴ is 0, B3 is 2′-OMe, n⁵ is 3, B1′ is 2′-OMe or 2′-F, q¹ is 9, T1′ is 2′-F, q² is 1, B2′ is 2′-OMe or 2′-F, q³ is 4, q⁴ is 0, B3′ is 2′-OMe or 2′-F, q⁵ is 7, T3′ is 2′-F, q⁶ is 1, B4′ is 2′-OMe, and q⁷ is 1; with two phosphorothioate internucleotide linkage modifications within position 1-5 of the sense strand (counting from the 5′-end), and two phosphorothioate internucleotide linkage modifications at positions 1 and 2 and two phosphorothioate internucleotide linkage modifications within positions 18-23 of the antisense strand (counting from the 5′-end). The RNAi agent also comprises a 5′-PS.

[0410] In one embodiment, B1 is 2′-OMe or 2′-F, n¹ is 8, T1 is 2′F, n² is 3, B2 is 2′-OMe, n³ is 7, n⁴ is 0, B3 is 2′-OMe, n⁵ is 3, B1′ is 2′-OMe or 2′-F, q¹ is 9, T1′ is 2′-F, q² is 1, B2′ is 2′-OMe or 2′-F, q³ is 4, q⁴ is 0, B3′ is 2′-OMe or 2′-F, q⁵ is 7, T3′ is 2′-F, q⁶ is 1, B4′ is 2′-OMe, and q⁷ is 1; with two phosphorothioate internucleotide linkage modifications within position 1-5 of the sense strand (counting from the 5′-end), and two phosphorothioate internucleotide linkage modifications at positions 1 and 2 and two phosphorothioate internucleotide linkage modifications within positions 18-23 of the antisense strand (counting from the 5′-end). The RNAi agent also comprises a 5′-VP. The 5′-VP may be 5′-E-VP, 5′-Z-VP, or combination thereof.

[0411] In one embodiment, B1 is 2′-OMe or 2′-F, n¹ is 8, T1 is 2′F, n² is 3, B2 is 2′-OMe, n³ is 7, n⁴ is 0, B3 is 2′-OMe, n⁵ is 3, B1′ is 2′-OMe or 2′-F, q¹ is 9, T1′ is 2′-F, q² is 1, B2′ is 2′-OMe or 2′-F, q³ is 4, q⁴ is 0, B3′ is 2′-OMe or 2′-F, q⁵ is 7, T3′ is 2′-F, q⁶ is 1, B4′ is 2′-OMe, and q⁷ is 1; with two phosphorothioate internucleotide linkage modifications within position 1-5 of the sense strand (counting from the 5′-end), and two phosphorothioate internucleotide linkage modifications at positions 1 and 2 and two phosphorothioate internucleotide linkage modifications within positions 18-23 of the antisense strand (counting from the 5′-end). The RNAi agent also comprises a 5′-PS₂.

[0412] In one embodiment, B1 is 2′-OMe or 2′-F, n¹ is 8, T1 is 2′F, n² is 3, B2 is 2′-OMe, n³ is 7, n⁴ is 0, B3 is 2′-OMe, n⁵ is 3, B1′ is 2′-OMe or 2′-F, q¹ is 9, T1′ is 2′-F, q² is 1, B2′ is 2′-OMe or 2′-F, q³ is 4, q⁴ is 0, B3′ is 2′-OMe or 2′-F, q⁵ is 7, T3′ is 2′-F, q⁶ is 1, B4′ is 2′-OMe, and q⁷ is 1; with two phosphorothioate internucleotide linkage modifications within position 1-5 of the sense strand (counting from the 5′-end), and two phosphorothioate internucleotide linkage modifications at positions 1 and 2 and two phosphorothioate internucleotide linkage modifications within positions 18-23 of the antisense strand (counting from the 5′-end). The RNAi agent also comprises a 5′-deoxy-5′-C-malonyl.

[0413] In one embodiment, B1 is 2′-OMe or 2′-F, n¹ is 8, T1 is 2′F, n² is 3, B2 is 2′-OMe, n³ is 7, n⁴ is 0, B3 is 2′OMe, n⁵ is 3, B1′ is 2′-OMe or 2′-F, q¹ is 9, T1′ is 2′-F, q² is 1, B2′ is 2′-OMe or 2′-F, q³ is 4, T2′ is 2′-F, q⁴ is 2, B3′ is 2′-OMe or 2′-F, q⁵ is 5, T3′ is 2′-F, q⁶ is 1, B4′ is 2′-F, and q⁷ is 1. The RNAi agent also comprises a 5′-P.

[0414] In one embodiment, B1 is 2′-OMe or 2′-F, n¹ is 8, T1 is 2′F, n² is 3, B2 is 2′-OMe, n³ is 7, n⁴ is 0, B3 is 2′OMe, n⁵ is 3, B1′ is 2′-OMe or 2′-F, q¹ is 9, T1′ is 2′-F, q² is 1, B2′ is 2′-OMe or 2′-F, q³ is 4, T2′ is 2′-F, q⁴ is 2, B3′ is 2′-OMe or 2′-F, q⁵ is 5, T3′ is 2′-F, q⁶ is 1, B4′ is 2′-F, and q⁷ is 1. The RNAi agent also comprises a 5′-PS.

[0415] In one embodiment, B1 is 2′-OMe or 2′-F, n¹ is 8, T1 is 2′F, n² is 3, B2 is 2′-OMe, n³ is 7, n⁴ is 0, B3 is 2′OMe, n⁵ is 3, B1′ is 2′-OMe or 2′-F, q¹ is 9, T1′ is 2′-F, q² is 1, B2′ is 2′-OMe or 2′-F, q³ is 4, T2′ is 2′-F, q⁴ is 2, B3′ is 2′-OMe or 2′-F, q⁵ is 5, T3′ is 2′-F, q⁶ is 1, B4′ is 2′-F, and q⁷ is 1. The RNAi agent also comprises a 5′-VP. The 5′-VP may be 5′-E-VP, 5′-Z-VP, or combination thereof.

[0416] In one embodiment, B1 is 2′-OMe or 2′-F, n¹ is 8, T1 is 2′F, n² is 3, B2 is 2′-OMe, n³ is 7, n⁴ is 0, B3 is 2′OMe, n⁵ is 3, B1′ is 2′-OMe or 2′-F, q¹ is 9, T1′ is 2′-F, q² is 1, B2′ is 2′-OMe or 2′-F, q³ is 4, T2′ is 2′-F, q⁴ is 2, B3′ is 2′-OMe or 2′-F, q⁵ is 5, T3′ is 2′-F, q⁶ is 1, B4′ is 2′-F, and q⁷ is 1. The dsRNAi RNA agent also comprises a 5′-PS₂.

[0417] In one embodiment, B1 is 2′-OMe or 2′-F, n¹ is 8, T1 is 2′F, n² is 3, B2 is 2′-OMe, n³ is 7, n⁴ is 0, B3 is 2′OMe, n⁵ is 3, B1′ is 2′-OMe or 2′-F, q¹ is 9, T1′ is 2′-F, q² is 1, B2′ is 2′-OMe or 2′-F, q³ is 4, T2′ is 2′-F, q⁴ is 2, B3′ is 2′-OMe or 2′-F, q⁵ is 5, T3′ is 2′-F, q⁶ is 1, B4′ is 2′-F, and q⁷ is 1.

[0418] The RNAi agent also comprises a 5′-deoxy-5′-C-malonyl.

[0419] In one embodiment, B1 is 2′-OMe or 2′-F, n¹ is 8, T1 is 2′F, n² is 3, B2 is 2′-OMe, n³ is 7, n⁴ is 0, B3 is 2′-OMe, n⁵ is 3, B1′ is 2′-OMe or 2′-F, q¹ is 9, T1′ is 2′-F, q² is 1, B2′ is 2′-OMe or 2′-F, q³ is 4, T2′ is 2′-F, q⁴ is 2, B3′ is 2′-OMe or 2′-F, q⁵ is 5, T3′ is 2′-F, q⁶ is 1, B4′ is 2′-F, and q⁷ is 1; with two phosphorothioate internucleotide linkage modifications within position 1-5 of the sense strand (counting from the 5′-end of the sense strand), and two phosphorothioate internucleotide linkage modifications at positions 1 and 2 and two phosphorothioate internucleotide linkage modifications within positions 18-23 of the antisense strand (counting from the 5′-end of the antisense strand). The RNAi agent also comprises a 5′-P.

[0420] In one embodiment, B1 is 2′-OMe or 2′-F, n¹ is 8, T1 is 2′F, n² is 3, B2 is 2′-OMe, n³ is 7, n⁴ is 0, B3 is 2′-OMe, n⁵ is 3, B1′ is 2′-OMe or 2′-F, q¹ is 9, T1′ is 2′-F, q² is 1, B2′ is 2′-OMe or 2′-F, q³ is 4, T2′ is 2′-F, q⁴ is 2, B3′ is 2′-OMe or 2′-F, q⁵ is 5, T3′ is 2′-F, q⁶ is 1, B4′ is 2′-F, and q⁷ is 1; with two phosphorothioate internucleotide linkage modifications within position 1-5 of the sense strand (counting from the 5′-end of the sense strand), and two phosphorothioate internucleotide linkage modifications at positions 1 and 2 and two phosphorothioate internucleotide linkage modifications within positions 18-23 of the antisense strand (counting from the 5′-end of the antisense strand). The RNAi agent also comprises a 5′-PS.

[0421] In one embodiment, B1 is 2′-OMe or 2′-F, n¹ is 8, T1 is 2′F, n² is 3, B2 is 2′-OMe, n³ is 7, n⁴ is 0, B3 is 2′-OMe, n⁵ is 3, B1′ is 2′-OMe or 2′-F, q¹ is 9, T1′ is 2′-F, q² is 1, B2′ is 2′-OMe or 2′-F, q³ is 4, T2′ is 2′-F, q⁴ is 2, B3′ is 2′-OMe or 2′-F, q⁵ is 5, T3′ is 2′-F, q⁶ is 1, B4′ is 2′-F, and q⁷ is 1; with two phosphorothioate internucleotide linkage modifications within position 1-5 of the sense strand (counting from the 5′-end of the sense strand), and two phosphorothioate internucleotide linkage modifications at positions 1 and 2 and two phosphorothioate internucleotide linkage modifications within positions 18-23 of the antisense strand (counting from the 5′-end of the antisense strand). The RNAi agent also comprises a 5′-VP. The 5′-VP may be 5′-E-VP, 5′-Z-VP, or combination thereof.

[0422] In one embodiment, B1 is 2′-OMe or 2′-F, n¹ is 8, T1 is 2′F, n² is 3, B2 is 2′-OMe, n³ is 7, n⁴ is 0, B3 is 2′-OMe, n⁵ is 3, B1′ is 2′-OMe or 2′-F, q¹ is 9, T1′ is 2′-F, q² is 1, B2′ is 2′-OMe or 2′-F, q³ is 4, T2′ is 2′-F, q⁴ is 2, B3′ is 2′-OMe or 2′-F, q⁵ is 5, T3′ is 2′-F, q⁶ is 1, B4′ is 2′-F, and q⁷ is 1; with two phosphorothioate internucleotide linkage modifications within position 1-5 of the sense strand (counting from the 5′-end of the sense strand), and two phosphorothioate internucleotide linkage modifications at positions 1 and 2 and two phosphorothioate internucleotide linkage modifications within positions 18-23 of the antisense strand (counting from the 5′-end of the antisense strand). The RNAi agent also comprises a 5′-PS₂.

[0423] In one embodiment, B1 is 2′-OMe or 2′-F, n¹ is 8, T1 is 2′F, n² is 3, B2 is 2′-OMe, n³ is 7, n⁴ is 0, B3 is 2′-OMe, n⁵ is 3, B1′ is 2′-OMe or 2′-F, q¹ is 9, T1′ is 2′-F, q² is 1, B2′ is 2′-OMe or 2′-F, q³ is 4, T2′ is 2′-F, q⁴ is 2, B3′ is 2′-OMe or 2′-F, q⁵ is 5, T3′ is 2′-F, q⁶ is 1, B4′ is 2′-F, and q⁷ is 1; with two phosphorothioate internucleotide linkage modifications within position 1-5 of the sense strand (counting from the 5′-end of the sense strand), and two phosphorothioate internucleotide linkage modifications at positions 1 and 2 and two phosphorothioate internucleotide linkage modifications within positions 18-23 of the antisense strand (counting from the 5′-end of the antisense strand). The RNAi agent also comprises a 5′-deoxy-5′-C-malonyl.

[0424] In one embodiment, B1 is 2′-OMe or 2′-F, n¹ is 8, T1 is 2′F, n² is 3, B2 is 2′-OMe, n³ is 7, n⁴ is 0, B3 is 2′-OMe, n⁵ is 3, B1′ is 2′-OMe or 2′-F, q¹ is 9, T1′ is 2′-F, q² is 1, B2′ is 2′-OMe or 2′-F, q³ is 4, q⁴ is 0, B3′ is 2′-OMe or 2′-F, q⁵ is 7, T3′ is 2′-F, q⁶ is 1, B4′ is 2′-F, and q⁷ is 1. The RNAi agent also comprises a 5′-P.

[0425] In one embodiment, B1 is 2′-OMe or 2′-F, n¹ is 8, T1 is 2′F, n² is 3, B2 is 2′-OMe, n³ is 7, n⁴ is 0, B3 is 2′-OMe, n⁵ is 3, B1′ is 2′-OMe or 2′-F, q¹ is 9, T1′ is 2′-F, q² is 1, B2′ is 2′-OMe or 2′-F, q³ is 4, q⁴ is 0, B3′ is 2′-OMe or 2′-F, q⁵ is 7, T3′ is 2′-F, q⁶ is 1, B4′ is 2′-F, and q⁷ is 1. The RNAi agent also comprises a 5′-PS.

[0426] In one embodiment, B1 is 2′-OMe or 2′-F, n¹ is 8, T1 is 2′F, n² is 3, B2 is 2′-OMe, n³ is 7, n⁴ is 0, B3 is 2′-OMe, n⁵ is 3, B1′ is 2′-OMe or 2′-F, q¹ is 9, T1′ is 2′-F, q² is 1, B2′ is 2′-OMe or 2′-F, q³ is 4, q⁴ is 0, B3′ is 2′-OMe or 2′-F, q⁵ is 7, T3′ is 2′-F, q⁶ is 1, B4′ is 2′-F, and q⁷ is 1. The RNAi agent also comprises a 5′-VP. The 5′-VP may be 5′-E-VP, 5′-Z-VP, or combination thereof.

[0427] In one embodiment, B1 is 2′-OMe or 2′-F, n¹ is 8, T1 is 2′F, n² is 3, B2 is 2′-OMe, n³ is 7, n⁴ is 0, B3 is 2′-OMe, n⁵ is 3, B1′ is 2′-OMe or 2′-F, q¹ is 9, T1′ is 2′-F, q² is 1, B2′ is 2′-OMe or 2′-F, q³ is 4, q⁴ is 0, B3′ is 2′-OMe or 2′-F, q⁵ is 7, T3′ is 2′-F, q⁶ is 1, B4′ is 2′-F, and q⁷ is 1. The RNAi agent also comprises a 5′-PS₂.

[0428] In one embodiment, B1 is 2′-OMe or 2′-F, n¹ is 8, T1 is 2′F, n² is 3, B2 is 2′-OMe, n³ is 7, n⁴ is 0, B3 is 2′-OMe, n⁵ is 3, B1′ is 2′-OMe or 2′-F, q¹ is 9, T1′ is 2′-F, q² is 1, B2′ is 2′-OMe or 2′-F, q³ is 4, q⁴ is 0, B3′ is 2′-OMe or 2′-F, q⁵ is 7, T3′ is 2′-F, q⁶ is 1, B4′ is 2′-F, and q⁷ is 1. The RNAi agent also comprises a 5′-deoxy-5′-C-malonyl.

[0429] In one embodiment, B1 is 2′-OMe or 2′-F, n¹ is 8, T1 is 2′F, n² is 3, B2 is 2′-OMe, n³ is 7, n⁴ is 0, B3 is 2′-OMe, n⁵ is 3, B1′ is 2′-OMe or 2′-F, q¹ is 9, T1′ is 2′-F, q² is 1, B2′ is 2′-OMe or 2′-F, q³ is 4, q⁴ is 0, B3′ is 2′-OMe or 2′-F, q⁵ is 7, T3′ is 2′-F, q⁶ is 1, B4′ is 2′-F, and q⁷ is 1; with two phosphorothioate internucleotide linkage modifications within position 1-5 of the sense strand (counting from the 5′-end of the sense strand), and two phosphorothioate internucleotide linkage modifications at positions 1 and 2 and two phosphorothioate internucleotide linkage modifications within positions 18-23 of the antisense strand (counting from the 5′-end of the antisense strand). The RNAi agent also comprises a 5′-P.

[0430] In one embodiment, B1 is 2′-OMe or 2′-F, n¹ is 8, T1 is 2′F, n² is 3, B2 is 2′-OMe, n³ is 7, n⁴ is 0, B3 is 2′-OMe, n⁵ is 3, B1′ is 2′-OMe or 2′-F, q¹ is 9, T1′ is 2′-F, q² is 1, B2′ is 2′-OMe or 2′-F, q³ is 4, q⁴ is 0, B3′ is 2′-OMe or 2′-F, q⁵ is 7, T3′ is 2′-F, q⁶ is 1, B4′ is 2′-F, and q⁷ is 1; with two phosphorothioate internucleotide linkage modifications within position 1-5 of the sense strand (counting from the 5′-end of the sense strand), and two phosphorothioate internucleotide linkage modifications at positions 1 and 2 and two phosphorothioate internucleotide linkage modifications within positions 18-23 of the antisense strand (counting from the 5′-end of the antisense strand). The RNAi agent also comprises a 5′-PS.

[0431] In one embodiment, B1 is 2′-OMe or 2′-F, n¹ is 8, T1 is 2′F, n² is 3, B2 is 2′-OMe, n³ is 7, n⁴ is 0, B3 is 2′-OMe, n⁵ is 3, B1′ is 2′-OMe or 2′-F, q¹ is 9, T1′ is 2′-F, q² is 1, B2′ is 2′-OMe or 2′-F, q³ is 4, q⁴ is 0, B3′ is 2′-OMe or 2′-F, q⁵ is 7, T3′ is 2′-F, q⁶ is 1, B4′ is 2′-F, and q⁷ is 1; with two phosphorothioate internucleotide linkage modifications within position 1-5 of the sense strand (counting from the 5′-end of the sense strand), and two phosphorothioate internucleotide linkage modifications at positions 1 and 2 and two phosphorothioate internucleotide linkage modifications within positions 18-23 of the antisense strand (counting from the 5′-end of the antisense strand). The RNAi agent also comprises a 5′-VP. The 5′-VP may be 5′-E-VP, 5′-Z-VP, or combination thereof.

[0432] In one embodiment, B1 is 2′-OMe or 2′-F, n¹ is 8, T1 is 2′F, n² is 3, B2 is 2′-OMe, n³ is 7, n⁴ is 0, B3 is 2′-OMe, n⁵ is 3, B1′ is 2′-OMe or 2′-F, q¹ is 9, T1′ is 2′-F, q² is 1, B2′ is 2′-OMe or 2′-F, q³ is 4, q⁴ is 0, B3′ is 2′-OMe or 2′-F, q⁵ is 7, T3′ is 2′-F, q⁶ is 1, B4′ is 2′-F, and q⁷ is 1; with two phosphorothioate internucleotide linkage modifications within position 1-5 of the sense strand (counting from the 5′-end of the sense strand), and two phosphorothioate internucleotide linkage modifications at positions 1 and 2 and two phosphorothioate internucleotide linkage modifications within positions 18-23 of the antisense strand (counting from the 5′-end of the antisense strand). The RNAi agent also comprises a 5′-PS₂.

[0433] In one embodiment, B1 is 2′-OMe or 2′-F, n¹ is 8, T1 is 2′F, n² is 3, B2 is 2′-OMe, n³ is 7, n⁴ is 0, B3 is 2′-OMe, n⁵ is 3, B1′ is 2′-OMe or 2′-F, q¹ is 9, T1′ is 2′-F, q² is 1, B2′ is 2′-OMe or 2′-F, q³ is 4, q⁴ is 0, B3′ is 2′-OMe or 2′-F, q⁵ is 7, T3′ is 2′-F, q⁶ is 1, B4′ is 2′-F, and q⁷ is 1; with two phosphorothioate internucleotide linkage modifications within position 1-5 of the sense strand (counting from the 5′-end of the sense strand), and two phosphorothioate internucleotide linkage modifications at positions 1 and 2 and two phosphorothioate internucleotide linkage modifications within positions 18-23 of the antisense strand (counting from the 5′-end of the antisense strand). The RNAi agent also comprises a 5′-deoxy-5′-C-malonyl.

[0434] In one embodiment, B1 is 2′-OMe or 2′-F, n¹ is 8, T1 is 2′F, n² is 3, B2 is 2′-OMe, n³ is 7, n⁴ is 0, B3 is 2′-OMe, n⁵ is 3, B1′ is 2′-OMe or 2′-F, q¹ is 9, T1′ is 2′-F, q² is 1, B2′ is 2′-OMe or 2′-F, q³ is 4, T2′ is 2′-F, q⁴ is 2, B3′ is 2′-OMe or 2′-F, q⁵ is 5, T3′ is 2′-F, q⁶ is 1, B4′ is 2′-OMe, and q⁷ is 1; with two phosphorothioate internucleotide linkage modifications within position 1-5 of the sense strand (counting from the 5′-end of the sense strand), and two phosphorothioate internucleotide linkage modifications at positions 1 and 2 and two phosphorothioate internucleotide linkage modifications within positions 18-23 of the antisense strand (counting from the 5′-end of the antisense strand). The RNAi agent also comprises a 5′-P and a targeting ligand. In one embodiment, the 5′-P is at the 5′-end of the antisense strand, and the targeting ligand is at the 3′-end of the sense strand.

[0435] In one embodiment, B1 is 2′-OMe or 2′-F, n¹ is 8, T1 is 2′F, n² is 3, B2 is 2′-OMe, n³ is 7, n⁴ is 0, B3 is 2′-OMe, n⁵ is 3, B1′ is 2′-OMe or 2′-F, q¹ is 9, T1′ is 2′-F, q² is 1, B2′ is 2′-OMe or 2′-F, q³ is 4, T2′ is 2′-F, q⁴ is 2, B3′ is 2′-OMe or 2′-F, q⁵ is 5, T3′ is 2′-F, q⁶ is 1, B4′ is 2′-OMe, and q⁷ is 1; with two phosphorothioate internucleotide linkage modifications within position 1-5 of the sense strand (counting from the 5′-end of the sense strand), and two phosphorothioate internucleotide linkage modifications at positions 1 and 2 and two phosphorothioate internucleotide linkage modifications within positions 18-23 of the antisense strand (counting from the 5′-end of the antisense strand). The RNAi agent also comprises a 5′-PS and a targeting ligand. In one embodiment, the 5′-PS is at the 5′-end of the antisense strand, and the targeting ligand is at the 3′-end of the sense strand.

[0436] In one embodiment, B1 is 2′-OMe or 2′-F, n¹ is 8, T1 is 2′F, n² is 3, B2 is 2′-OMe, n³ is 7, n⁴ is 0, B3 is 2′-OMe, n⁵ is 3, B1′ is 2′-OMe or 2′-F, q¹ is 9, T1′ is 2′-F, q² is 1, B2′ is 2′-OMe or 2′-F, q³ is 4, T2′ is 2′-F, q⁴ is 2, B3′ is 2′-OMe or 2′-F, q⁵ is 5, T3′ is 2′-F, q⁶ is 1, B4′ is 2′-OMe, and q⁷ is 1; with two phosphorothioate internucleotide linkage modifications within position 1-5 of the sense strand (counting from the 5′-end of the sense strand), and two phosphorothioate internucleotide linkage modifications at positions 1 and 2 and two phosphorothioate internucleotide linkage modifications within positions 18-23 of the antisense strand (counting from the 5′-end of the antisense strand). The RNAi agent also comprises a 5′-VP (e.g., a 5′-E-VP, 5′-Z-VP, or combination thereof), and a targeting ligand.

[0437] In one embodiment, the 5′-VP is at the 5′-end of the antisense strand, and the targeting ligand is at the 3′-end of the sense strand.

[0438] In one embodiment, B1 is 2′-OMe or 2′-F, n¹ is 8, T1 is 2′F, n² is 3, B2 is 2′-OMe, n³ is 7, n⁴ is 0, B3 is 2′-OMe, n⁵ is 3, B1′ is 2′-OMe or 2′-F, q¹ is 9, T1′ is 2′-F, q² is 1, B2′ is 2′-OMe or 2′-F, q³ is 4, T2′ is 2′-F, q⁴ is 2, B3′ is 2′-OMe or 2′-F, q⁵ is 5, T3′ is 2′-F, q⁶ is 1, B4′ is 2′-OMe, and q⁷ is 1; with two phosphorothioate internucleotide linkage modifications within position 1-5 of the sense strand (counting from the 5′-end of the sense strand), and two phosphorothioate internucleotide linkage modifications at positions 1 and 2 and two phosphorothioate internucleotide linkage modifications within positions 18-23 of the antisense strand (counting from the 5′-end of the antisense strand). The RNAi agent also comprises a 5′-PS₂ and a targeting ligand. In one embodiment, the 5′-PS₂ is at the 5′-end of the antisense strand, and the targeting ligand is at the 3′-end of the sense strand.

[0439] In one embodiment, B1 is 2′-OMe or 2′-F, n¹ is 8, T1 is 2′F, n² is 3, B2 is 2′-OMe, n³ is 7, n⁴ is 0, B3 is 2′-OMe, n⁵ is 3, B1′ is 2′-OMe or 2′-F, q¹ is 9, T1′ is 2′-F, q² is 1, B2′ is 2′-OMe or 2′-F, q³ is 4, T2′ is 2′-F, q⁴ is 2, B3′ is 2′-OMe or 2′-F, q⁵ is 5, T3′ is 2′-F, q⁶ is 1, B4′ is 2′-OMe, and q⁷ is 1; with two phosphorothioate internucleotide linkage modifications within position 1-5 of the sense strand (counting from the 5′-end of the sense strand), and two phosphorothioate internucleotide linkage modifications at positions 1 and 2 and two phosphorothioate internucleotide linkage modifications within positions 18-23 of the antisense strand (counting from the 5′-end of the antisense strand). The RNAi agent also comprises a 5′-deoxy-5′-C-malonyl and a targeting ligand. In one embodiment, the 5′-deoxy-5′-C-malonyl is at the 5′-end of the antisense strand, and the targeting ligand is at the 3′-end of the sense strand.

[0440] In one embodiment, B1 is 2′-OMe or 2′-F, n¹ is 8, T1 is 2′F, n² is 3, B2 is 2′-OMe, n³ is 7, n⁴ is 0, B3 is 2′-OMe, n⁵ is 3, B1′ is 2′-OMe or 2′-F, q¹ is 9, T1′ is 2′-F, q² is 1, B2′ is 2′-OMe or 2′-F, q³ is 4, q⁴ is 0, B3′ is 2′-OMe or 2′-F, q⁵ is 7, T3′ is 2′-F, q⁶ is 1, B4′ is 2′-OMe, and q⁷ is 1; with two phosphorothioate internucleotide linkage modifications within position 1-5 of the sense strand (counting from the 5′-end), and two phosphorothioate internucleotide linkage modifications at positions 1 and 2 and two phosphorothioate internucleotide linkage modifications within positions 18-23 of the antisense strand (counting from the 5′-end). The RNAi agent also comprises a 5′-P and a targeting ligand. In one embodiment, the 5′-P is at the 5′-end of the antisense strand, and the targeting ligand is at the 3′-end of the sense strand.

[0441] In one embodiment, B1 is 2′-OMe or 2′-F, n¹ is 8, T1 is 2′F, n² is 3, B2 is 2′-OMe, n³ is 7, n⁴ is 0, B3 is 2′-OMe, n⁵ is 3, B1′ is 2′-OMe or 2′-F, q¹ is 9, T1′ is 2′-F, q² is 1, B2′ is 2′-OMe or 2′-F, q³ is 4, q⁴ is 0, B3′ is 2′-OMe or 2′-F, q⁵ is 7, T3′ is 2′-F, q⁶ is 1, B4′ is 2′-OMe, and q⁷ is 1; with two phosphorothioate internucleotide linkage modifications within position 1-5 of the sense strand (counting from the 5′-end), and two phosphorothioate internucleotide linkage modifications at positions 1 and 2 and two phosphorothioate internucleotide linkage modifications within positions 18-23 of the antisense strand (counting from the 5′-end). The RNAi agent also comprises a 5′-PS and a targeting ligand. In one embodiment, the 5′-PS is at the 5′-end of the antisense strand, and the targeting ligand is at the 3′-end of the sense strand.

[0442] In one embodiment, B1 is 2′-OMe or 2′-F, n¹ is 8, T1 is 2′F, n² is 3, B2 is 2′-OMe, n³ is 7, n⁴ is 0, B3 is 2′-OMe, n⁵ is 3, B1′ is 2′-OMe or 2′-F, q¹ is 9, T1′ is 2′-F, q² is 1, B2′ is 2′-OMe or 2′-F, q³ is 4, q⁴ is 0, B3′ is 2′-OMe or 2′-F, q⁵ is 7, T3′ is 2′-F, q⁶ is 1, B4′ is 2′-OMe, and q⁷ is 1; with two phosphorothioate internucleotide linkage modifications within position 1-5 of the sense strand (counting from the 5′-end), and two phosphorothioate internucleotide linkage modifications at positions 1 and 2 and two phosphorothioate internucleotide linkage modifications within positions 18-23 of the antisense strand (counting from the 5′-end). The RNAi agent also comprises a 5′-VP (e.g., a 5′-E-VP, 5′-Z-VP, or combination thereof) and a targeting ligand. In one embodiment, the 5′-VP is at the 5′-end of the antisense strand, and the targeting ligand is at the 3′-end of the sense strand.

[0443] In one embodiment, B1 is 2′-OMe or 2′-F, n¹ is 8, T1 is 2′F, n² is 3, B2 is 2′-OMe, n³ is 7, n⁴ is 0, B3 is 2′-OMe, n⁵ is 3, B1′ is 2′-OMe or 2′-F, q¹ is 9, T1′ is 2′-F, q² is 1, B2′ is 2′-OMe or 2′-F, q³ is 4, q⁴ is 0, B3′ is 2′-OMe or 2′-F, q⁵ is 7, T3′ is 2′-F, q⁶ is 1, B4′ is 2′-OMe, and q⁷ is 1; with two phosphorothioate internucleotide linkage modifications within position 1-5 of the sense strand (counting from the 5′-end), and two phosphorothioate internucleotide linkage modifications at positions 1 and 2 and two phosphorothioate internucleotide linkage modifications within positions 18-23 of the antisense strand (counting from the 5′-end). The RNAi agent also comprises a 5′-PS₂ and a targeting ligand. In one embodiment, the 5′-PS₂ is at the 5′-end of the antisense strand, and the targeting ligand is at the 3′-end of the sense strand.

[0444] In one embodiment, B1 is 2′-OMe or 2′-F, n¹ is 8, T1 is 2′F, n² is 3, B2 is 2′-OMe, n³ is 7, n⁴ is 0, B3 is 2′-OMe, n⁵ is 3, B1′ is 2′-OMe or 2′-F, q¹ is 9, T1′ is 2′-F, q² is 1, B2′ is 2′-OMe or 2′-F, q³ is 4, q⁴ is 0, B3′ is 2′-OMe or 2′-F, q⁵ is 7, T3′ is 2′-F, q⁶ is 1, B4′ is 2′-OMe, and q⁷ is 1; with two phosphorothioate internucleotide linkage modifications within position 1-5 of the sense strand (counting from the 5′-end), and two phosphorothioate internucleotide linkage modifications at positions 1 and 2 and two phosphorothioate internucleotide linkage modifications within positions 18-23 of the antisense strand (counting from the 5′-end). The RNAi agent also comprises a 5′-deoxy-5′-C-malonyl and a targeting ligand. In one embodiment, the 5′-deoxy-5′-C-malonyl is at the 5′-end of the antisense strand, and the targeting ligand is at the 3′-end of the sense strand.

[0445] In one embodiment, B1 is 2′-OMe or 2′-F, n¹ is 8, T1 is 2′F, n² is 3, B2 is 2′-OMe, n³ is 7, n⁴ is 0, B3 is 2′-OMe, n⁵ is 3, B1′ is 2′-OMe or 2′-F, q¹ is 9, T1′ is 2′-F, q² is 1, B2′ is 2′-OMe or 2′-F, q³ is 4, T2′ is 2′-F, q⁴ is 2, B3′ is 2′-OMe or 2′-F, q⁵ is 5, T3′ is 2′-F, q⁶ is 1, B4′ is 2′-F, and q⁷ is 1; with two phosphorothioate internucleotide linkage modifications within position 1-5 of the sense strand (counting from the 5′-end of the sense strand), and two phosphorothioate internucleotide linkage modifications at positions 1 and 2 and two phosphorothioate internucleotide linkage modifications within positions 18-23 of the antisense strand (counting from the 5′-end of the antisense strand). The RNAi agent also comprises a 5′-P and a targeting ligand. In one embodiment, the 5′-P is at the 5′-end of the antisense strand, and the targeting ligand is at the 3′-end of the sense strand.

[0446] In one embodiment, B1 is 2′-OMe or 2′-F, n¹ is 8, T1 is 2′F, n² is 3, B2 is 2′-OMe, n³ is 7, n⁴ is 0, B3 is 2′-OMe, n⁵ is 3, B1′ is 2′-OMe or 2′-F, q¹ is 9, T1′ is 2′-F, q² is 1, B2′ is 2′-OMe or 2′-F, q³ is 4, T2′ is 2′-F, q⁴ is 2, B3′ is 2′-OMe or 2′-F, q⁵ is 5, T3′ is 2′-F, q⁶ is 1, B4′ is 2′-F, and q⁷ is 1; with two phosphorothioate internucleotide linkage modifications within position 1-5 of the sense strand (counting from the 5′-end of the sense strand), and two phosphorothioate internucleotide linkage modifications at positions 1 and 2 and two phosphorothioate internucleotide linkage modifications within positions 18-23 of the antisense strand (counting from the 5′-end of the antisense strand). The RNAi agent also comprises a 5′-PS and a targeting ligand. In one embodiment, the 5′-PS is at the 5′-end of the antisense strand, and the targeting ligand is at the 3′-end of the sense strand.

[0447] In one embodiment, B1 is 2′-OMe or 2′-F, n¹ is 8, T1 is 2′F, n² is 3, B2 is 2′-OMe, n³ is 7, n⁴ is 0, B3 is 2′-OMe, n⁵ is 3, B1′ is 2′-OMe or 2′-F, q¹ is 9, T1′ is 2′-F, q² is 1, B2′ is 2′-OMe or 2′-F, q³ is 4, T2′ is 2′-F, q⁴ is 2, B3′ is 2′-OMe or 2′-F, q⁵ is 5, T3′ is 2′-F, q⁶ is 1, B4′ is 2′-F, and q⁷ is 1; with two phosphorothioate internucleotide linkage modifications within position 1-5 of the sense strand (counting from the 5′-end of the sense strand), and two phosphorothioate internucleotide linkage modifications at positions 1 and 2 and two phosphorothioate internucleotide linkage modifications within positions 18-23 of the antisense strand (counting from the 5′-end of the antisense strand). The RNAi agent also comprises a 5′-VP (e.g., a 5′-E-VP, 5′-Z-VP, or combination thereof) and a targeting ligand. In one embodiment, the 5′-VP is at the 5′-end of the antisense strand, and the targeting ligand is at the 3′-end of the sense strand.

[0448] In one embodiment, B1 is 2′-OMe or 2′-F, n¹ is 8, T1 is 2′F, n² is 3, B2 is 2′-OMe, n³ is 7, n⁴ is 0, B3 is 2′-OMe, n⁵ is 3, B1′ is 2′-OMe or 2′-F, q¹ is 9, T1′ is 2′-F, q² is 1, B2′ is 2′-OMe or 2′-F, q³ is 4, T2′ is 2′-F, q⁴ is 2, B3′ is 2′-OMe or 2′-F, q⁵ is 5, T3′ is 2′-F, q⁶ is 1, B4′ is 2′-F, and q⁷ is 1; with two phosphorothioate internucleotide linkage modifications within position 1-5 of the sense strand (counting from the 5′-end of the sense strand), and two phosphorothioate internucleotide linkage modifications at positions 1 and 2 and two phosphorothioate internucleotide linkage modifications within positions 18-23 of the antisense strand (counting from the 5′-end of the antisense strand). The RNAi agent also comprises a 5′-PS₂ and a targeting ligand. In one embodiment, the 5′-PS₂ is at the 5′-end of the antisense strand, and the targeting ligand is at the 3′-end of the sense strand.

[0449] In one embodiment, B1 is 2′-OMe or 2′-F, n¹ is 8, T1 is 2′F, n² is 3, B2 is 2′-OMe, n³ is 7, n⁴ is 0, B3 is 2′-OMe, n⁵ is 3, B1′ is 2′-OMe or 2′-F, q¹ is 9, T1′ is 2′-F, q² is 1, B2′ is 2′-OMe or 2′-F, q³ is 4, T2′ is 2′-F, q⁴ is 2, B3′ is 2′-OMe or 2′-F, q⁵ is 5, T3′ is 2′-F, q⁶ is 1, B4′ is 2′-F, and q⁷ is 1; with two phosphorothioate internucleotide linkage modifications within position 1-5 of the sense strand (counting from the 5′-end of the sense strand), and two phosphorothioate internucleotide linkage modifications at positions 1 and 2 and two phosphorothioate internucleotide linkage modifications within positions 18-23 of the antisense strand (counting from the 5′-end of the antisense strand). The RNAi agent also comprises a 5′-deoxy-5′-C-malonyl and a targeting ligand. In one embodiment, the 5′-deoxy-5′-C-malonyl is at the 5′-end of the antisense strand, and the targeting ligand is at the 3′-end of the sense strand.

[0450] In one embodiment, B1 is 2′-OMe or 2′-F, n¹ is 8, T1 is 2′F, n² is 3, B2 is 2′-OMe, n³ is 7, n⁴ is 0, B3 is 2′-OMe, n⁵ is 3, B1′ is 2′-OMe or 2′-F, q¹ is 9, T1′ is 2′-F, q² is 1, B2′ is 2′-OMe or 2′-F, q³ is 4, q⁴ is 0, B3′ is 2′-OMe or 2′-F, q⁵ is 7, T3′ is 2′-F, q⁶ is 1, B4′ is 2′-F, and q⁷ is 1; with two phosphorothioate internucleotide linkage modifications within position 1-5 of the sense strand (counting from the 5′-end of the sense strand), and two phosphorothioate internucleotide linkage modifications at positions 1 and 2 and two phosphorothioate internucleotide linkage modifications within positions 18-23 of the antisense strand (counting from the 5′-end of the antisense strand). The RNAi agent also comprises a 5′-P and a targeting ligand. In one embodiment, the 5′-P is at the 5′-end of the antisense strand, and the targeting ligand is at the 3′-end of the sense strand.

[0451] In one embodiment, B1 is 2′-OMe or 2′-F, n¹ is 8, T1 is 2′F, n² is 3, B2 is 2′-OMe, n³ is 7, n⁴ is 0, B3 is 2′-OMe, n⁵ is 3, B1′ is 2′-OMe or 2′-F, q¹ is 9, T1′ is 2′-F, q² is 1, B2′ is 2′-OMe or 2′-F, q³ is 4, q⁴ is 0, B3′ is 2′-OMe or 2′-F, q⁵ is 7, T3′ is 2′-F, q⁶ is 1, B4′ is 2′-F, and q⁷ is 1; with two phosphorothioate internucleotide linkage modifications within position 1-5 of the sense strand (counting from the 5′-end of the sense strand), and two phosphorothioate internucleotide linkage modifications at positions 1 and 2 and two phosphorothioate internucleotide linkage modifications within positions 18-23 of the antisense strand (counting from the 5′-end of the antisense strand). The RNAi agent also comprises a 5′-PS and a targeting ligand. In one embodiment, the 5′-PS is at the 5′-end of the antisense strand, and the targeting ligand is at the 3′-end of the sense strand.

[0452] In one embodiment, B1 is 2′-OMe or 2′-F, n¹ is 8, T1 is 2′F, n² is 3, B2 is 2′-OMe, n³ is 7, n⁴ is 0, B3 is 2′-OMe, n⁵ is 3, B1′ is 2′-OMe or 2′-F, q¹ is 9, T1′ is 2′-F, q² is 1, B2′ is 2′-OMe or 2′-F, q³ is 4, q⁴ is 0, B3′ is 2′-OMe or 2′-F, q⁵ is 7, T3′ is 2′-F, q⁶ is 1, B4′ is 2′-F, and q⁷ is 1; with two phosphorothioate internucleotide linkage modifications within position 1-5 of the sense strand (counting from the 5′-end of the sense strand), and two phosphorothioate internucleotide linkage modifications at positions 1 and 2 and two phosphorothioate internucleotide linkage modifications within positions 18-23 of the antisense strand (counting from the 5′-end of the antisense strand). The RNAi agent also comprises a 5′-VP (e.g., a 5′-E-VP, 5′-Z-VP, or combination thereof) and a targeting ligand. In one embodiment, the 5′-VP is at the 5′-end of the antisense strand, and the targeting ligand is at the 3′-end of the sense strand.

[0453] In one embodiment, B1 is 2′-OMe or 2′-F, n¹ is 8, T1 is 2′F, n² is 3, B2 is 2′-OMe, n³ is 7, n⁴ is 0, B3 is 2′-OMe, n⁵ is 3, B1′ is 2′-OMe or 2′-F, q¹ is 9, T1′ is 2′-F, q² is 1, B2′ is 2′-OMe or 2′-F, q³ is 4, q⁴ is 0, B3′ is 2′-OMe or 2′-F, q⁵ is 7, T3′ is 2′-F, q⁶ is 1, B4′ is 2′-F, and q⁷ is 1; with two phosphorothioate internucleotide linkage modifications within position 1-5 of the sense strand (counting from the 5′-end of the sense strand), and two phosphorothioate internucleotide linkage modifications at positions 1 and 2 and two phosphorothioate internucleotide linkage modifications within positions 18-23 of the antisense strand (counting from the 5′-end of the antisense strand). The RNAi agent also comprises a 5′-PS₂ and a targeting ligand. In one embodiment, the 5′-PS₂ is at the 5′-end of the antisense strand, and the targeting ligand is at the 3′-end of the sense strand.

[0454] In one embodiment, B1 is 2′-OMe or 2′-F, n¹ is 8, T1 is 2′F, n² is 3, B2 is 2′-OMe, n³ is 7, n⁴ is 0, B3 is 2′-OMe, n⁵ is 3, B1′ is 2′-OMe or 2′-F, q¹ is 9, T1′ is 2′-F, q² is 1, B2′ is 2′-OMe or 2′-F, q³ is 4, q⁴ is 0, B3′ is 2′-OMe or 2′-F, q⁵ is 7, T3′ is 2′-F, q⁶ is 1, B4′ is 2′-F, and q⁷ is 1; with two phosphorothioate internucleotide linkage modifications within position 1-5 of the sense strand (counting from the 5′-end of the sense strand), and two phosphorothioate internucleotide linkage modifications at positions 1 and 2 and two phosphorothioate internucleotide linkage modifications within positions 18-23 of the antisense strand (counting from the 5′-end of the antisense strand). The RNAi agent also comprises a 5′-deoxy-5′-C-malonyl and a targeting ligand. In one embodiment, the 5′-deoxy-5′-C-malonyl is at the 5′-end of the antisense strand, and the targeting ligand is at the 3′-end of the sense strand.

[0455] In a particular embodiment, an RNAi agent of the present invention comprises:
[0456] (a) a sense strand having:
   [0457] (i) a length of 21 nucleotides;
   [0458] (ii) an ASGPR ligand attached to the 3′-end, wherein said ASGPR ligand comprises three GalNAc derivatives attached through a trivalent branched linker; and
   [0459] (iii) 2′-F modifications at positions 1, 3, 5, 7, 9 to 11, 13, 17, 19, and 21, and 2′-OMe modifications at positions 2, 4, 6, 8, 12, 14 to 16, 18, and 20 (counting from the 5′ end); and
[0460] (b) an antisense strand having:
   [0461] (i) a length of 23 nucleotides;
   [0462] (ii) 2′-OMe modifications at positions 1, 3, 5, 9, 11 to 13, 15, 17, 19, 21, and 23, and 2′F modifications at positions 2, 4, 6 to 8, 10, 14, 16, 18, 20, and 22 (counting from the 5′ end); and
   [0463] (iii) phosphorothioate internucleotide linkages between nucleotide positions 21 and 22, and between nucleotide positions 22 and 23 (counting from the 5′ end);
[0464] wherein the dsRNA agents have a two nucleotide overhang at the 3′-end of the antisense strand, and a blunt end at the 5′-end of the antisense strand.

[0465] In another particular embodiment, an RNAi agent of the present invention comprises:
[0466] (a) a sense strand having:
   [0467] (i) a length of 21 nucleotides;
   [0468] (ii) an ASGPR ligand attached to the 3′-end, wherein said ASGPR ligand comprises three GalNAc derivatives attached through a trivalent branched linker;
   [0469] (iii) 2′-F modifications at positions 1, 3, 5, 7, 9 to 11, 13, 15, 17, 19, and 21, and 2′-OMe modifications at positions 2, 4, 6, 8, 12, 14, 16, 18, and 20 (counting from the 5′ end); and
   [0470] (iv) phosphorothioate internucleotide linkages between nucleotide positions 1 and 2, and between nucleotide positions 2 and 3 (counting from the 5′ end);
[0471] and
[0472] (b) an antisense strand having:
   [0473] (i) a length of 23 nucleotides;
   [0474] (ii) 2′-OMe modifications at positions 1, 3, 5, 7, 9, 11 to 13, 15, 17, 19, and 21 to 23, and 2′F modifications at positions 2, 4, 6, 8, 10, 14, 16, 18, and 20 (counting from the 5′ end); and
   [0475] (iii) phosphorothioate internucleotide linkages between nucleotide positions 1 and 2, between nucleotide positions 2 and 3, between nucleotide positions 21 and 22, and between nucleotide positions 22 and 23 (counting from the 5′ end);
      wherein the RNAi agents have a two nucleotide overhang at the 3′-end of the antisense strand, and a blunt end at the 5′-end of the antisense strand.

[0476] In another particular embodiment, a RNAi agent of the present invention comprises:
[0477] (a) a sense strand having:
   [0478] (i) a length of 21 nucleotides;
   [0479] (ii) an ASGPR ligand attached to the 3′-end, wherein said ASGPR ligand comprises three GalNAc derivatives attached through a trivalent branched linker;
   [0480] (iii) 2′-OMe modifications at positions 1 to 6, 8, 10, and 12 to 21, 2′-F modifications at positions 7, and 9, and a deoxy-nucleotide (e.g. dT) at position 11 (counting from the 5′ end); and
   [0481] (iv) phosphorothioate internucleotide linkages between nucleotide positions 1 and 2, and between nucleotide positions 2 and 3 (counting from the 5′ end);
[0482] and
[0483] (b) an antisense strand having:
   [0484] (i) a length of 23 nucleotides;
   [0485] (ii) 2′-OMe modifications at positions 1, 3, 7, 9, 11, 13, 15, 17, and 19 to 23, and 2′-F modifications at positions 2, 4 to 6, 8, 10, 12, 14, 16, and 18 (counting from the 5′ end); and
   [0486] (iii) phosphorothioate internucleotide linkages between nucleotide positions 1 and 2, between nucleotide positions 2 and 3, between nucleotide positions 21 and 22, and between nucleotide positions 22 and 23 (counting from the 5′ end);
      wherein the RNAi agents have a two nucleotide overhang at the 3′-end of the antisense strand, and a blunt end at the 5′-end of the antisense strand.

[0487] In another particular embodiment, a RNAi agent of the present invention comprises:
[0488] (a) a sense strand having:
   [0489] (i) a length of 21 nucleotides;
   [0490] (ii) an ASGPR ligand attached to the 3′-end, wherein said ASGPR ligand comprises three GalNAc derivatives attached through a trivalent branched linker;
   [0491] (iii) 2′-OMe modifications at positions 1 to 6, 8, 10, 12, 14, and 16 to 21, and 2′-F modifications at positions 7, 9, 11, 13, and 15; and
   [0492] (iv) phosphorothioate internucleotide linkages between nucleotide positions 1 and 2, and between nucleotide positions 2 and 3 (counting from the 5′ end);
[0493] and
[0494] (b) an antisense strand having:
   [0495] (i) a length of 23 nucleotides;
   [0496] (ii) 2′-OMe modifications at positions 1, 5, 7, 9, 11, 13, 15, 17, 19, and 21 to 23, and 2′-F modifications at positions 2 to 4, 6, 8, 10, 12, 14, 16, 18, and 20 (counting from the 5′ end); and
   [0497] (iii) phosphorothioate internucleotide linkages between nucleotide positions 1 and 2, between nucleotide positions 2 and 3, between nucleotide positions 21 and 22, and between nucleotide positions 22 and 23 (counting from the 5′ end);
      wherein the RNAi agents have a two nucleotide overhang at the 3′-end of the antisense strand, and a blunt end at the 5′-end of the antisense strand.

[0498] In another particular embodiment, a RNAi agent of the present invention comprises:
[0499] (a) a sense strand having:
   [0500] (i) a length of 21 nucleotides;
   [0501] (ii) an ASGPR ligand attached to the 3′-end, wherein said ASGPR ligand comprises three GalNAc derivatives attached through a trivalent branched linker;
   [0502] (iii) 2′-OMe modifications at positions 1 to 9, and 12 to 21, and 2′-F modifications at positions 10, and 11; and
   [0503] (iv) phosphorothioate internucleotide linkages between nucleotide positions 1 and 2, and between nucleotide positions 2 and 3 (counting from the 5′ end);
[0504] and
[0505] (b) an antisense strand having:
   [0506] (i) a length of 23 nucleotides;
   [0507] (ii) 2′-OMe modifications at positions 1, 3, 5, 7, 9, 11 to 13, 15, 17, 19, and 21 to 23, and 2′-F modifications at positions 2, 4, 6, 8, 10, 14, 16, 18, and 20 (counting from the 5′ end); and
   [0508] (iii) phosphorothioate internucleotide linkages between nucleotide positions 1 and 2, between nucleotide positions 2 and 3, between nucleotide positions 21 and 22, and between nucleotide positions 22 and 23 (counting from the 5′ end);
      wherein the RNAi agents have a two nucleotide overhang at the 3′-end of the antisense strand, and a blunt end at the 5′-end of the antisense strand.

[0509] In another particular embodiment, a RNAi agent of the present invention comprises:
[0510] (a) a sense strand having:
   [0511] (i) a length of 21 nucleotides;
   [0512] (ii) an ASGPR ligand attached to the 3′-end, wherein said ASGPR ligand comprises three GalNAc derivatives attached through a trivalent branched linker;
   [0513] (iii) 2′-F modifications at positions 1, 3, 5, 7, 9 to 11, and 13, and 2′-OMe modifications at positions 2, 4, 6, 8, 12, and 14 to 21; and
   [0514] (iv) phosphorothioate internucleotide linkages between nucleotide positions 1 and 2, and between nucleotide positions 2 and 3 (counting from the 5′ end);
[0515] and
[0516] (b) an antisense strand having:
   [0517] (i) a length of 23 nucleotides;
   [0518] (ii) 2′-OMe modifications at positions 1, 3, 5 to 7, 9, 11 to 13, 15, 17 to 19, and 21 to 23, and 2′-F modifications at positions 2, 4, 8, 10, 14, 16, and 20 (counting from the 5′ end); and
   [0519] (iii) phosphorothioate internucleotide linkages between nucleotide positions 1 and 2, between nucleotide positions 2 and 3, between nucleotide positions 21 and 22, and between nucleotide positions 22 and 23 (counting from the 5′ end);
      wherein the RNAi agents have a two nucleotide overhang at the 3′-end of the antisense strand, and a blunt end at the 5′-end of the antisense strand.

[0520] In another particular embodiment, a RNAi agent of the present invention comprises:
[0521] (a) a sense strand having:
   [0522] (i) a length of 21 nucleotides;
   [0523] (ii) an ASGPR ligand attached to the 3′-end, wherein said ASGPR ligand comprises three GalNAc derivatives attached through a trivalent branched linker;
   [0524] (iii) 2′-OMe modifications at positions 1, 2, 4, 6, 8, 12, 14, 15, 17, and 19 to 21, and 2′-F modifications at positions 3, 5, 7, 9 to 11, 13, 16, and 18; and
   [0525] (iv) phosphorothioate internucleotide linkages between nucleotide positions 1 and 2, and between nucleotide positions 2 and 3 (counting from the 5′ end);
[0526] and
[0527] (b) an antisense strand having:
   [0528] (i) a length of 25 nucleotides;
   [0529] (ii) 2′-OMe modifications at positions 1, 4, 6, 7, 9, 11 to 13, 15, 17, and 19 to 23, 2′-F modifications at positions 2, 3, 5, 8, 10, 14, 16, and 18, and desoxy-nucleotides (e.g. dT) at positions 24 and 25 (counting from the 5′ end); and
   [0530] (iii) phosphorothioate internucleotide linkages between nucleotide positions 1 and 2, between nucleotide positions 2 and 3, between nucleotide positions 21 and 22, and between nucleotide positions 22 and 23 (counting from the 5′ end);
      wherein the RNAi agents have a four nucleotide overhang at the 3′-end of the antisense strand, and a blunt end at the 5′-end of the antisense strand.

[0531] In another particular embodiment, a RNAi agent of the present invention comprises:
[0532] (a) a sense strand having:
   [0533] (i) a length of 21 nucleotides;
   [0534] (ii) an ASGPR ligand attached to the 3′-end, wherein said ASGPR ligand comprises three GalNAc derivatives attached through a trivalent branched linker;
   [0535] (iii) 2′-OMe modifications at positions 1 to 6, 8, and 12 to 21, and 2′-F modifications at positions 7, and 9 to 11; and
   [0536] (iv) phosphorothioate internucleotide linkages between nucleotide positions 1 and 2, and between nucleotide positions 2 and 3 (counting from the 5′ end);
[0537] and
[0538] (b) an antisense strand having:
   [0539] (i) a length of 23 nucleotides;
   [0540] (ii) 2′-OMe modifications at positions 1, 3 to 5, 7, 8, 10 to 13, 15, and 17 to 23, and 2′-F modifications at positions 2, 6, 9, 14, and 16 (counting from the 5′ end); and
   [0541] (iii) phosphorothioate internucleotide linkages between nucleotide positions 1 and 2, between nucleotide positions 2 and 3, between nucleotide positions 21 and 22, and between nucleotide positions 22 and 23 (counting from the 5′ end);
      wherein the RNAi agents have a two nucleotide overhang at the 3′-end of the antisense strand, and a blunt end at the 5′-end of the antisense strand.

[0542] In another particular embodiment, a RNAi agent of the present invention comprises:
[0543] (a) a sense strand having:
   [0544] (i) a length of 21 nucleotides;
   [0545] (ii) an ASGPR ligand attached to the 3′-end, wherein said ASGPR ligand comprises three GalNAc derivatives attached through a trivalent branched linker;
   [0546] (iii) 2′-OMe modifications at positions 1 to 6, 8, and 12 to 21, and 2′-F modifications at positions 7, and 9 to 11; and
   [0547] (iv) phosphorothioate internucleotide linkages between nucleotide positions 1 and 2, and between nucleotide positions 2 and 3 (counting from the 5′ end);
[0548] and
[0549] (b) an antisense strand having:
   [0550] (i) a length of 23 nucleotides;
   [0551] (ii) 2′-OMe modifications at positions 1, 3 to 5, 7, 10 to 13, 15, and 17 to 23, and 2′-F modifications at positions 2, 6, 8, 9, 14, and 16 (counting from the 5′ end); and
   [0552] (iii) phosphorothioate internucleotide linkages between nucleotide positions 1 and 2, between nucleotide positions 2 and 3, between nucleotide positions 21 and 22, and between nucleotide positions 22 and 23 (counting from the 5′ end);
      wherein the RNAi agents have a two nucleotide overhang at the 3′-end of the antisense strand, and a blunt end at the 5′-end of the antisense strand.

[0553] In another particular embodiment, a RNAi agent of the present invention comprises:
[0554] (a) a sense strand having:
   [0555] (i) a length of 19 nucleotides;
   [0556] (ii) an ASGPR ligand attached to the 3′-end, wherein said ASGPR ligand comprises three GalNAc derivatives attached through a trivalent branched linker;
   [0557] (iii) 2′-OMe modifications at positions 1 to 4, 6, and 10 to 19, and 2′-F modifications at positions 5, and 7 to 9; and
   [0558] (iv) phosphorothioate internucleotide linkages between nucleotide positions 1 and 2, and between nucleotide positions 2 and 3 (counting from the 5′ end);
[0559] and
[0560] (b) an antisense strand having:
   [0561] (i) a length of 21 nucleotides;
   [0562] (ii) 2′-OMe modifications at positions 1, 3 to 5, 7, 10 to 13, 15, and 17 to 21, and 2′-F modifications at positions 2, 6, 8, 9, 14, and 16 (counting from the 5′ end); and
   [0563] (iii) phosphorothioate internucleotide linkages between nucleotide positions 1 and 2, between nucleotide positions 2 and 3, between nucleotide positions 19 and 20, and between nucleotide positions 20 and 21 (counting from the 5′ end);
      wherein the RNAi agents have a two nucleotide overhang at the 3′-end of the antisense strand, and a blunt end at the 5′-end of the antisense strand.

[0564] In certain embodiments, the iRNA for use in the methods of the invention is an agent selected from agents listed in any one of Tables 2-7, 13, 16, 19 and 20. These agents may further comprise a ligand.

### III. iRNAs Conjugated to Ligands

[0565] Another modification of the RNA of an iRNA of the invention involves chemically linking to the iRNA one or more ligands, moieties or conjugates that enhance the activity, cellular distribution, or cellular uptake of the iRNA e.g., into a cell. Such moieties include but are not limited to lipid moieties such as a cholesterol moiety (Letsinger et al., Proc. Natl. Acid. Sci. USA, 1989, 86: 6553-6556). In other embodiments, the ligand is cholic acid (Manoharan et al., Biorg. Med. Chem. Let., 1994, 4:1053-1060), a thioether, e.g., beryl-S-tritylthiol (Manoharan et al., Ann. N.Y. Acad. Sci., 1992, 660:306-309; Manoharan et al., Biorg. Med. Chem. Let., 1993, 3:2765-2770), a thiocholesterol (Oberhauser et al., Nucl. Acids Res., 1992, 20:533-538), an aliphatic chain, e.g., dodecandiol or undecyl residues (Saison-Behmoaras et al., EMBO J, 1991, 10:1111-1118; Kabanov et al., FEBS Lett., 1990, 259:327-330; Svinarchuk et al., Biochimie, 1993, 75:49-54), a phospholipid, e.g., di-hexadecyl-rac-glycerol or triethyl-ammonium 1,2-di-O-hexadecyl-rac-glycero-3-phosphonate (Manoharan et al., Tetrahedron Lett., 1995, 36:3651-3654; Shea et al., Nucl. Acids Res., 1990, 18:3777-3783), a polyamine or a polyethylene glycol chain (Manoharan et al., Nucleosides & Nucleotides, 1995, 14:969-973), or adamantane acetic acid (Manoharan et al., Tetrahedron Lett., 1995, 36:3651-3654), a palmityl moiety (Mishra et al., Biochim. Biophys. Acta, 1995, 1264:229-237), or an octadecylamine or hexylamino-carbonyloxycholesterol moiety (Crooke et al., J. Pharmacol. Exp. Ther., 1996, 277:923-937).

[0566] In certain embodiments, a ligand alters the distribution, targeting, or lifetime of an iRNA agent into which it is incorporated. In certain embodiments a ligand provides an enhanced affinity for a selected target, e.g., molecule, cell or cell type, compartment, e.g., a cellular or organ compartment, tissue, organ or region of the body, as, e.g., compared to a species absent such a ligand. In some embodiments, ligands do not take part in duplex pairing in a duplexed nucleic acid.

[0567] Ligands can include a naturally occurring substance, such as a protein (e.g., human serum albumin (HSA), low-density lipoprotein (LDL), or globulin); carbohydrate (e.g., a dextran, pullulan, chitin, chitosan, inulin, cyclodextrin, N-acetylglucosamine, N-acetylgalactosamine, or hyaluronic acid); or a lipid. The ligand can also be a recombinant or synthetic molecule, such as a synthetic polymer, e.g., a synthetic polyamino acid. Examples of polyamino acids include polyamino acid is a polylysine (PLL), poly L-aspartic acid, poly L-glutamic acid, styrene-maleic acid anhydride copolymer, poly(L-lactide-co-glycolied) copolymer, divinyl ether-maleic anhydride copolymer, N-(2-hydroxypropyl)methacrylamide copolymer (HMPA), polyethylene glycol (PEG), polyvinyl alcohol (PVA), polyurethane, poly(2-ethylacryllic acid), N-isopropylacrylamide polymers, or polyphosphazine. Example of polyamines include: polyethylenimine, polylysine (PLL), spermine, spermidine, polyamine, pseudopeptide-polyamine, peptidomimetic polyamine, dendrimer polyamine, arginine, amidine, protamine, cationic lipid, cationic porphyrin, quaternary salt of a polyamine, or an alpha helical peptide.

[0568] Ligands can also include targeting groups, e.g., a cell or tissue targeting agent, e.g., a lectin, glycoprotein, lipid or protein, e.g., an antibody, that binds to a specified cell type such as a kidney cell. A targeting group can be a thyrotropin, melanotropin, lectin, glycoprotein, surfactant protein A, Mucin carbohydrate, multivalent lactose, multivalent galactose, N-acetyl-galactosamine, N-acetyl-glucosamine multivalent mannose, multivalent fucose, glycosylated polyaminoacids, multivalent galactose, transferrin, bisphosphonate, polyglutamate, polyaspartate, a lipid, cholesterol, a steroid, bile acid, folate, vitamin B12, vitamin A, biotin, or an RGD peptide or RGD peptide mimetic. In certain embodiments, the ligand is a multivalent galactose, e.g., an N-acetyl-galactosamine.

[0569] Other examples of ligands include dyes, intercalating agents (e.g. acridines), cross-linkers (e.g. psoralene, mitomycin C), porphyrins (TPPC4, texaphyrin, Sapphyrin), polycyclic aromatic hydrocarbons (e.g., phenazine, dihydrophenazine), artificial endonucleases (e.g. EDTA), lipophilic molecules, e.g., cholesterol, cholic acid, adamantane acetic acid, 1-pyrene butyric acid, dihydrotestosterone, 1,3-Bis-O(hexadecyl)glycerol, geranyloxyhexyl group, hexadecylglycerol, borneol, menthol, 1,3-propanediol, heptadecyl group, palmitic acid, myristic acid, O3-(oleoyl)lithocholic acid, O3-(oleoyl)cholenic acid, dimethoxytrityl, or phenoxazine) and peptide conjugates (e.g., antennapedia peptide, Tat peptide), alkylating agents, phosphate, amino, mercapto, PEG (e.g., PEG-40K), MPEG, [MPEG]₂, polyamino, alkyl, substituted alkyl, radiolabeled markers, enzymes, haptens (e.g. biotin), transport/absorption facilitators (e.g., aspirin, vitamin E, folic acid), synthetic ribonucleases (e.g., imidazole, bisimidazole, histamine, imidazole clusters, acridine-imidazole conjugates, Eu3+ complexes of tetraazamacrocycles), dinitrophenyl, HRP, or AP.

[0570] Ligands can be proteins, e.g., glycoproteins, or peptides, e.g., molecules having a specific affinity for a co-ligand, or antibodies e.g., an antibody, that binds to a specified cell type such as a hepatic cell. Ligands can also include hormones and hormone receptors. They can also include non-peptidic species, such as lipids, lectins, carbohydrates, vitamins, cofactors, multivalent lactose, multivalent galactose, N-acetyl-galactosamine, N-acetyl-glucosamine multivalent mannose, or multivalent fucose. The ligand can be, for example, a lipopolysaccharide, an activator of p38 MAP kinase, or an activator of NF-κB.

[0571] The ligand can be a substance, e.g., a drug, which can increase the uptake of the iRNA agent into the cell, for example, by disrupting the cell's cytoskeleton, e.g., by disrupting the cell's microtubules, microfilaments, or intermediate filaments. The drug can be, for example, taxol, vincristine, vinblastine, cytochalasin, nocodazole, japlakinolide, latrunculin A, phalloidin, swinholide A, indanocine, or myoservin.

[0572] In some embodiments, a ligand attached to an iRNA as described herein acts as a pharmacokinetic modulator (PK modulator). PK modulators include lipophiles, bile acids, steroids, phospholipid analogues, peptides, protein binding agents, PEG, vitamins, etc. Exemplary PK modulators include, but are not limited to, cholesterol, fatty acids, cholic acid, lithocholic acid, dialkylglycerides, diacylglyceride, phospholipids, sphingolipids, naproxen, ibuprofen, vitamin E, biotin. Oligonucleotides that comprise a number of phosphorothioate linkages are also known to bind to serum protein, thus short oligonucleotides, e.g., oligonucleotides of about 5 bases, 10 bases, 15 bases, or 20 bases, comprising multiple of phosphorothioate linkages in the backbone are also amenable to the present invention as ligands (e.g. as PK modulating ligands). In addition, aptamers that bind serum components (e.g. serum proteins) are also suitable for use as PK modulating ligands in the embodiments described herein.

[0573] Ligand-conjugated iRNAs of the invention may be synthesized by the use of an oligonucleotide that bears a pendant reactive functionality, such as that derived from the attachment of a linking molecule onto the oligonucleotide (described below). This reactive oligonucleotide may be reacted directly with commercially-available ligands, ligands that are synthesized bearing any of a variety of protecting groups, or ligands that have a linking moiety attached thereto.

[0574] The oligonucleotides used in the conjugates of the present invention may be conveniently and routinely made through the well-known technique of solid-phase synthesis. Equipment for such synthesis is sold by several vendors including, for example, Applied Biosystems® (Foster City, Calif.). Any other methods for such synthesis known in the art may additionally or alternatively be employed. It is also known to use similar techniques to prepare other oligonucleotides, such as the phosphorothioates and alkylated derivatives.

[0575] In the ligand-conjugated iRNAs and ligand-molecule bearing sequence-specific linked nucleosides of the present invention, the oligonucleotides and oligonucleosides may be assembled on a suitable DNA synthesizer utilizing standard nucleotide or nucleoside precursors, or nucleotide or nucleoside conjugate precursors that already bear the linking moiety, ligand-nucleotide or nucleoside-conjugate precursors that already bear the ligand molecule, or non-nucleoside ligand-bearing building blocks.

[0576] When using nucleotide-conjugate precursors that already bear a linking moiety, the synthesis of the sequence-specific linked nucleosides is typically completed, and the ligand molecule is then reacted with the linking moiety to form the ligand-conjugated oligonucleotide. In some embodiments, the oligonucleotides or linked nucleosides of the present invention are synthesized by an automated synthesizer using phosphoramidites derived from ligand-nucleoside conjugates in addition to the standard phosphoramidites and non-standard phosphoramidites that are commercially available and routinely used in oligonucleotide synthesis.

[0577] A. Lipid Conjugates

[0578] In certain embodiments, the ligand or conjugate is a lipid or lipid-based molecule. Such a lipid or lipid-based molecule may bind a serum protein, e.g., human serum albumin (HSA). An HSA binding ligand allows for distribution of the conjugate to a target tissue, e.g., a non-kidney target tissue of the body. For example, the target tissue can be the liver, including parenchymal cells of the liver. Other molecules that can bind HSA can also be used as ligands. For example, naproxen or aspirin can be used. A lipid or lipid-based ligand can (a) increase resistance to degradation of the conjugate, (b) increase targeting or transport into a target cell or cell membrane, or (c) can be used to adjust binding to a serum protein, e.g., HSA.

[0579] A lipid based ligand can be used to inhibit, e.g., control the binding of the conjugate to a target tissue. For example, a lipid or lipid-based ligand that binds to HSA more strongly will be less likely to be targeted to the kidney and therefore less likely to be cleared from the body. A lipid or lipid-based ligand that binds to HSA less strongly can be used to target the conjugate to the kidney.

[0580] In certain embodiments, the lipid based ligand binds HSA. In one embodiment, it binds HSA with a sufficient affinity such that the conjugate will be distributed to a non-kidney tissue. However, it is preferred that the affinity not be so strong that the HSA-ligand binding cannot be reversed.

[0581] In other embodiments, the lipid based ligand binds HSA weakly or not at all, such that the conjugate will be distributed to the kidney. Other moieties that target to kidney cells can also be used in place of, or in addition to, the lipid based ligand.

[0582] In another aspect, the ligand is a moiety, e.g., a vitamin, which is taken up by a target cell, e.g., a proliferating cell. These are particularly useful for treating disorders characterized by unwanted cell proliferation, e.g., of the malignant or non-malignant type, e.g., cancer cells. Exemplary vitamins include vitamin A, E, and K. Other exemplary vitamins include are B vitamin, e.g., folic acid, B12, riboflavin, biotin, pyridoxal or other vitamins or nutrients taken up by target cells such as liver cells. Also included are HSA and low density lipoprotein (LDL).

[0583] B. Cell Permeation Agents

[0584] In another aspect, the ligand is a cell-permeation agent, such as, a helical cell-permeation agent. In one embodiment, the agent is amphipathic. An exemplary agent is a peptide such as tat or antennopedia. If the agent is a peptide, it can be modified, including a peptidylmimetic, invertomers, non-peptide or pseudo-peptide linkages, and use of D-amino acids. In one embodiment, the helical agent is an alpha-helical agent, for example, having a lipophilic and a lipophobic phase.

[0585] The ligand can be a peptide or peptidomimetic. A peptidomimetic (also referred to herein as an oligopeptidomimetic) is a molecule capable of folding into a defined three-dimensional structure similar to a natural peptide. The attachment of peptide and peptidomimetics to iRNA agents can affect pharmacokinetic distribution of the iRNA, such as by enhancing cellular recognition and absorption. The peptide or peptidomimetic moiety can be about 5-50 amino acids long, e.g., about 5, 10, 15, 20, 25, 30, 35, 40, 45, or 50 amino acids long.

[0586] A peptide or peptidomimetic can be, for example, a cell permeation peptide, cationic peptide, amphipathic peptide, or hydrophobic peptide (e.g., consisting primarily of Tyr, Trp, or Phe). The peptide moiety can be a dendrimer peptide, constrained peptide or crosslinked peptide. In another alternative, the peptide moiety can include a hydrophobic membrane translocation sequence (MTS).

[0587] An exemplary hydrophobic MTS-containing peptide is RFGF having the amino acid sequence AAVALLPAVLLALLAP (SEQ ID NO:15). An RFGF analogue (e.g., amino acid sequence AALLPVLLAAP (SEQ ID NO:16) containing a hydrophobic MTS can also be a targeting moiety. The peptide moiety can be a “delivery” peptide, which can carry large polar molecules including peptides, oligonucleotides, and protein across cell membranes. For example, sequences from the HIV Tat protein (GRKKRRQRRRPPQ (SEQ ID NO:17) and the Drosophila Antennapedia protein (RQIKIWFQNRRMKWKK (SEQ ID NO:18) have been found to be capable of functioning as delivery peptides. A peptide or peptidomimetic can be encoded by a random sequence of DNA, such as a peptide identified from a phage-display library, or one-bead-one-compound (OBOC) combinatorial library (Lam et al., Nature, 354:82-84, 1991). Examples of a peptide or peptidomimetic tethered to a dsRNA agent via an incorporated monomer unit for cell targeting purposes is an arginine-glycine-aspartic acid (RGD)-peptide, or RGD mimic. A peptide moiety can range in length from about 5 amino acids to about 40 amino acids. The peptide moieties can have a structural modification, such as to increase stability or direct conformational properties. Any of the structural modifications described below can be utilized.

[0588] An RGD peptide for use in the compositions and methods of the invention may be linear or cyclic, and may be modified, e.g., glycosylated or methylated, to facilitate targeting to a specific tissue(s). RGD-containing peptides and peptidiomimemtics may include D-amino acids, as well as synthetic RGD mimics. In addition to RGD, one can use other moieties that target the integrin ligand, such as, PECAM-1 or VEGF.

[0589] A “cell permeation peptide” is capable of permeating a cell, e.g., a microbial cell, such as a bacterial or fungal cell, or a mammalian cell, such as a human cell. A microbial cell-permeating peptide can be, for example, an α-helical linear peptide (e.g., LL-37 or Ceropin P1), a disulfide bond-containing peptide (e.g., α-defensin, β-defensin or bactenecin), or a peptide containing only one or two dominating amino acids (e.g., PR-39 or indolicidin). A cell permeation peptide can also include a nuclear localization signal (NLS). For example, a cell permeation peptide can be a bipartite amphipathic peptide, such as MPG, which is derived from the fusion peptide domain of HIV-1 gp41 and the NLS of SV40 large T antigen (Simeoni et al., Nucl. Acids Res. 31:2717-2724, 2003).

[0590] C. Carbohydrate Conjugates

[0591] In some embodiments of the compositions and methods of the invention, an iRNA further comprises a carbohydrate. The carbohydrate conjugated iRNA is advantageous for the in vivo delivery of nucleic acids, as well as compositions suitable for in vivo therapeutic use, as described herein. As used herein, “carbohydrate” refers to a compound which is either a carbohydrate per se made up of one or more monosaccharide units having at least 6 carbon atoms (which can be linear, branched or cyclic) with an oxygen, nitrogen or sulfur atom bonded to each carbon atom; or a compound having as a part thereof a carbohydrate moiety made up of one or more monosaccharide units each having at least six carbon atoms (which can be linear, branched or cyclic), with an oxygen, nitrogen or sulfur atom bonded to each carbon atom. Representative carbohydrates include the sugars (mono-, di-, tri-, and oligosaccharides containing from about 4, 5, 6, 7, 8, or 9 monosaccharide units), and polysaccharides such as starches, glycogen, cellulose and polysaccharide gums. Specific monosaccharides include C5 and above (e.g., C5, C6, C7, or C8) sugars; di- and trisaccharides include sugars having two or three monosaccharide units (e.g., C5, C6, C7, or C8).

[0592] In certain embodiments, a carbohydrate conjugate for use in the compositions and methods of the invention is a monosaccharide.

[0593] In certain embodiments, the monosaccharide is an N-acetylgalactosamine (GalNAc). GalNAc conjugates, which comprise one or more N-acetylgalactosamine (GalNAc) derivatives, are described, for example, in U.S. Pat. No. 8,106,022, the entire content of which is hereby incorporated herein by reference. In some embodiments, the GalNAc conjugate serves as a ligand that targets the iRNA to particular cells. In some embodiments, the GalNAc conjugate targets the iRNA to liver cells, e.g., by serving as a ligand for the asialoglycoprotein receptor of liver cells (e.g., hepatocytes).

[0594] In some embodiments, the carbohydrate conjugate comprises one or more GalNAc derivatives. The GalNAc derivatives may be attached via a linker, e.g., a bivalent or trivalent branched linker. In some embodiments the GalNAc conjugate is conjugated to the 3′ end of the sense strand. In some embodiments, the GalNAc conjugate is conjugated to the iRNA agent (e.g., to the 3′ end of the sense strand) via a linker, e.g., a linker as described herein. In some embodiments the GalNAc conjugate is conjugated to the 5′ end of the sense strand. In some embodiments, the GalNAc conjugate is conjugated to the iRNA agent (e.g., to the 5′ end of the sense strand) via a linker, e.g., a linker as described herein.

[0595] In certain embodiments of the invention, the GalNAc or GalNAc derivative is attached to an iRNA agent of the invention via a monovalent linker. In some embodiments, the GalNAc or GalNAc derivative is attached to an iRNA agent of the invention via a bivalent linker. In yet other embodiments of the invention, the GalNAc or GalNAc derivative is attached to an iRNA agent of the invention via a trivalent linker. In other embodiments of the invention, the GalNAc or GalNAc derivative is attached to an iRNA agent of the invention via a tetravalent linker.

[0596] In certain embodiments, the double stranded RNAi agents of the invention comprise one GalNAc or GalNAc derivative attached to the iRNA agent. In certain embodiments, the double stranded RNAi agents of the invention comprise a plurality (e.g., 2, 3, 4, 5, or 6) GalNAc or GalNAc derivatives, each independently attached to a plurality of nucleotides of the double stranded RNAi agent through a plurality of monovalent linkers.

[0597] In some embodiments, for example, when the two strands of an iRNA agent of the invention are part of one larger molecule connected by an uninterrupted chain of nucleotides between the 3′-end of one strand and the 5′-end of the respective other strand forming a hairpin loop comprising, a plurality of unpaired nucleotides, each unpaired nucleotide within the hairpin loop may independently comprise a GalNAc or GalNAc derivative attached via a monovalent linker. The hairpin loop may also be formed by an extended overhang in one strand of the duplex.

[0598] In some embodiments, for example, when the two strands of an iRNA agent of the invention are part of one larger molecule connected by an uninterrupted chain of nucleotides between the 3′-end of one strand and the 5′-end of the respective other strand forming a hairpin loop comprising, a plurality of unpaired nucleotides, each unpaired nucleotide within the hairpin loop may independently comprise a GalNAc or GalNAc derivative attached via a monovalent linker. The hairpin loop may also be formed by an extended overhang in one strand of the duplex.

[0599] In one embodiment, a carbohydrate conjugate for use in the compositions and methods of the invention is selected from the group consisting of:

[chemical structure]

[chemical structure]

[chemical structure]

[chemical structure]

[chemical structure]

[chemical structure]

wherein Y is O or S and n is 3-6 (Formula XXIV);

[chemical structure]

wherein Y is O or S and n is 3-6 (Formula XXV);

[chemical structure]

wherein X is O or S (Formula XXVII);

[chemical structure]

[chemical structure]

[chemical structure]

[0600] In another embodiment, a carbohydrate conjugate for use in the compositions and methods of the invention is a monosaccharide. In one embodiment, the monosaccharide is an N-acetylgalactosamine, such as

[chemical structure]

[0601] In some embodiments, the RNAi agent is attached to the carbohydrate conjugate via a linker as shown in the following schematic, wherein X is O or S

[chemical structure]

[0602] In some embodiments, the RNAi agent is conjugated to L96 as defined in Table 1 and shown below:

[chemical structure]

[0603] Another representative carbohydrate conjugate for use in the embodiments described herein includes, but is not limited to,

[chemical structure]

when one of X or Y is an oligonucleotide, the other is a hydrogen.

[0604] In some embodiments, a suitable ligand is a ligand disclosed in WO 2019/055633, the entire contents of which are incorporated herein by reference. In one embodiment the ligand comprises the structure below:

[chemical structure]

[0605] In certain embodiments of the invention, the GalNAc or GalNAc derivative is attached to an iRNA agent of the invention via a monovalent linker. In some embodiments, the GalNAc or GalNAc derivative is attached to an iRNA agent of the invention via a bivalent linker. In yet other embodiments of the invention, the GalNAc or GalNAc derivative is attached to an iRNA agent of the invention via a trivalent linker.

[0606] In one embodiment, the double stranded RNAi agents of the invention comprise one or more GalNAc or GalNAc derivative attached to the iRNA agent. The GalNAc may be attached to any nucleotide via a linker on the sense strand or antsisense strand. The GalNac may be attached to the 5′-end of the sense strand, the 3′ end of the sense strand, the 5′-end of the antisense strand, or the 3′-end of the antisense strand. In one embodiment, the GalNAc is attached to the 3′ end of the sense strand, e.g., via a trivalent linker.

[0607] In other embodiments, the double stranded RNAi agents of the invention comprise a plurality (e.g., 2, 3, 4, 5, or 6) GalNAc or GalNAc derivatives, each independently attached to a plurality of nucleotides of the double stranded RNAi agent through a plurality of linkers, e.g., monovalent linkers.

[0608] In some embodiments, for example, when the two strands of an iRNA agent of the invention is part of one larger molecule connected by an uninterrupted chain of nucleotides between the 3′-end of one strand and the 5′-end of the respective other strand forming a hairpin loop comprising, a plurality of unpaired nucleotides, each unpaired nucleotide within the hairpin loop may independently comprise a GalNAc or GalNAc derivative attached via a monovalent linker.

[0609] In some embodiments, the carbohydrate conjugate further comprises one or more additional ligands as described above, such as, but not limited to, a PK modulator or a cell permeation peptide.

[0610] Additional carbohydrate conjugates and linkers suitable for use in the present invention include those described in PCT Publication Nos. WO 2014/179620 and WO 2014/179627, the entire contents of each of which are incorporated herein by reference.

[0611] D. Linkers

[0612] In some embodiments, the conjugate or ligand described herein can be attached to an iRNA oligonucleotide with various linkers that can be cleavable or non-cleavable.

[0613] The term “linker” or “linking group” means an organic moiety that connects two parts of a compound, e.g., covalently attaches two parts of a compound. Linkers typically comprise a direct bond or an atom such as oxygen or sulfur, a unit such as NR8, C(O), C(O)NH, SO, SO₂, SO₂NH or a chain of atoms, such as, but not limited to, substituted or unsubstituted alkyl, substituted or unsubstituted alkenyl, substituted or unsubstituted alkynyl, arylalkyl, arylalkenyl, arylalkynyl, heteroarylalkyl, heteroarylalkenyl, heteroarylalkynyl, heterocyclylalkyl, heterocyclylalkenyl, heterocyclylalkynyl, aryl, heteroaryl, heterocyclyl, cycloalkyl, cycloalkenyl, alkylarylalkyl, alkylarylalkenyl, alkylarylalkynyl, alkenylarylalkyl, alkenylarylalkenyl, alkenylarylalkynyl, alkynylarylalkyl, alkynylarylalkenyl, alkynylarylalkynyl, alkylheteroarylalkyl, alkylheteroarylalkenyl, alkylheteroarylalkynyl, alkenylheteroarylalkyl, alkenylheteroarylalkenyl, alkenylheteroarylalkynyl, alkynylheteroarylalkyl, alkynylheteroarylalkenyl, alkynylheteroarylalkynyl, alkylheterocyclylalkyl, alkylheterocyclylalkenyl, alkylhererocyclylalkynyl, alkenylheterocyclylalkyl, alkenylheterocyclylalkenyl, alkenylheterocyclylalkynyl, alkynylheterocyclylalkyl, alkynylheterocyclylalkenyl, alkynylheterocyclylalkynyl, alkylaryl, alkenylaryl, alkynylaryl, alkylheteroaryl, alkenylheteroaryl, alkynylhereroaryl, which one or more methylenes can be interrupted or terminated by O, S, S(O), SO₂, N(R8), C(O), substituted or unsubstituted aryl, substituted or unsubstituted heteroaryl, or substituted or unsubstituted heterocyclic; where R8 is hydrogen, acyl, aliphatic, or substituted aliphatic. In one embodiment, the linker is about 1-24 atoms, 2-24, 3-24, 4-24, 5-24, 6-24, 6-18, 7-18, 8-18, 7-17, 8-17, 6-16, 7-17, or 8-16 atoms.

[0614] A cleavable linking group is one which is sufficiently stable outside the cell, but which upon entry into a target cell is cleaved to release the two parts the linker is holding together. In one embodiment, the cleavable linking group is cleaved at least about 10 times, 20, times, 30 times, 40 times, 50 times, 60 times, 70 times, 80 times, 90 times, or more, or at least 100 times faster in a target cell or under a first reference condition (which can, e.g., be selected to mimic or represent intracellular conditions) than in the blood of a subject, or under a second reference condition (which can, e.g., be selected to mimic or represent conditions found in the blood or serum).

[0615] Cleavable linking groups are susceptible to cleavage agents, e.g., pH, redox potential, or the presence of degradative molecules. Generally, cleavage agents are more prevalent or found at higher levels or activities inside cells than in serum or blood. Examples of such degradative agents include: redox agents which are selected for particular substrates or which have no substrate specificity, including, e.g., oxidative or reductive enzymes or reductive agents such as mercaptans, present in cells, that can degrade a redox cleavable linking group by reduction; esterases; endosomes or agents that can create an acidic environment, e.g., those that result in a pH of five or lower; enzymes that can hydrolyze or degrade an acid cleavable linking group by acting as a general acid, peptidases (which can be substrate specific), and phosphatases.

[0616] A cleavable linkage group, such as a disulfide bond can be susceptible to pH. The pH of human serum is 7.4, while the average intracellular pH is slightly lower, ranging from about 7.1-7.3. Endosomes have a more acidic pH, in the range of 5.5-6.0, and lysosomes have an even more acidic pH at around 5.0. Some linkers will have a cleavable linking group that is cleaved at a selected pH, thereby releasing a cationic lipid from the ligand inside the cell, or into the desired compartment of the cell.

[0617] A linker can include a cleavable linking group that is cleavable by a particular enzyme. The type of cleavable linking group incorporated into a linker can depend on the cell to be targeted. For example, a liver-targeting ligand can be linked to a cationic lipid through a linker that includes an ester group. Liver cells are rich in esterases, and therefore the linker will be cleaved more efficiently in liver cells than in cell types that are not esterase-rich. Other cell-types rich in esterases include cells of the lung, renal cortex, and testis.

[0618] Linkers that contain peptide bonds can be used when targeting cell types rich in peptidases, such as liver cells and synoviocytes.

[0619] In general, the suitability of a candidate cleavable linking group can be evaluated by testing the ability of a degradative agent (or condition) to cleave the candidate linking group. It will also be desirable to also test the candidate cleavable linking group for the ability to resist cleavage in the blood or when in contact with other non-target tissue. Thus, one can determine the relative susceptibility to cleavage between a first and a second condition, where the first is selected to be indicative of cleavage in a target cell and the second is selected to be indicative of cleavage in other tissues or biological fluids, e.g., blood or serum. The evaluations can be carried out in cell free systems, in cells, in cell culture, in organ or tissue culture, or in whole animals. It can be useful to make initial evaluations in cell-free or culture conditions and to confirm by further evaluations in whole animals. In certain embodiments, useful candidate compounds are cleaved at least about 2, 4, 10, 20, 30, 40, 50, 60, 70, 80, 90, or 100 times faster in the cell (or under in vitro conditions selected to mimic intracellular conditions) as compared to blood or serum (or under in vitro conditions selected to mimic extracellular conditions).

[0620] i. Redox Cleavable Linking Groups

[0621] In certain embodiments, a cleavable linking group is a redox cleavable linking group that is cleaved upon reduction or oxidation. An example of reductively cleavable linking group is a disulphide linking group (—S—S—). To determine if a candidate cleavable linking group is a suitable “reductively cleavable linking group,” or for example is suitable for use with a particular iRNA moiety and particular targeting agent one can look to methods described herein. For example, a candidate can be evaluated by incubation with dithiothreitol (DTT), or other reducing agent using reagents know in the art, which mimic the rate of cleavage which would be observed in a cell, e.g., a target cell. The candidates can also be evaluated under conditions which are selected to mimic blood or serum conditions. In one, candidate compounds are cleaved by at most about 10% in the blood. In other embodiments, useful candidate compounds are degraded at least about 2, 4, 10, 20, 30, 40, 50, 60, 70, 80, 90, or about 100 times faster in the cell (or under in vitro conditions selected to mimic intracellular conditions) as compared to blood (or under in vitro conditions selected to mimic extracellular conditions). The rate of cleavage of candidate compounds can be determined using standard enzyme kinetics assays under conditions chosen to mimic intracellular media and compared to conditions chosen to mimic extracellular media.

[0622] ii. Phosphate-Based Cleavable Linking Groups

[0623] In other embodiments, a cleavable linker comprises a phosphate-based cleavable linking group. A phosphate-based cleavable linking group is cleaved by agents that degrade or hydrolyze the phosphate group. An example of an agent that cleaves phosphate groups in cells are enzymes such as phosphatases in cells. Examples of phosphate-based linking groups are —O—P(O)(ORk)-O—, —O—P(S)(ORk)-O—, —O—P(S)(SRk)-O—, —S—P(O)(ORk)-O—, —O—P(O)(ORk)-S—, —S—P(O)(ORk)-S—, —O—P(S)(ORk)-S—, —S—P(S)(ORk)-O—, —O—P(O)(Rk)-O—, —O—P(S)(Rk)-O—, —S—P(O)(Rk)-O—, —S—P(S)(Rk)-O—, —S—P(O)(Rk)-S—, —O—P(S)(Rk)-S—, wherein Rk at each occurrence can be, independently, C1-C20 alkyl, C1-C20 haloalkyl, C6-C10 aryl, or C7-C12 aralkyl. Exemplary embodiments include —O—P(O)(OH)—O—, —O—P(S)(OH)—O—, —O—P(S)(SH)—O—, —S—P(O)(OH)—O—, —O—P(O)(OH)—S—, —S—P(O)(OH)—S—, —O—P(S)(OH)—S—, —S—P(S)(OH)—O—, —O—P(O)(H)—O—, —O—P(S)(H)—O—, —S—P(O)(H)—O, —S—P(S)(H)—O—, —S—P(O)(H)—S—, and —O—P(S)(H)—S—. In certain embodiments, a phosphate-based linking group is —O—P(O)(OH)—O—. These candidates can be evaluated using methods analogous to those described above.

[0624] iii. Acid Cleavable Linking Groups

[0625] In other embodiments, a cleavable linker comprises an acid cleavable linking group. An acid cleavable linking group is a linking group that is cleaved under acidic conditions. In certain embodiments acid cleavable linking groups are cleaved in an acidic environment with a pH of about 6.5 or lower (e.g., about 6.0, 5.5, 5.0, or lower), or by agents such as enzymes that can act as a general acid. In a cell, specific low pH organelles, such as endosomes and lysosomes can provide a cleaving environment for acid cleavable linking groups. Examples of acid cleavable linking groups include but are not limited to hydrazones, esters, and esters of amino acids. Acid cleavable groups can have the general formula —C═NN—, C(O)O, or —OC(O). An exemplary embodiment is when the carbon attached to the oxygen of the ester (the alkoxy group) is an aryl group, substituted alkyl group, or tertiary alkyl group such as dimethyl pentyl or t-butyl. These candidates can be evaluated using methods analogous to those described above.

[0626] iv. Ester-Based Linking Groups

[0627] In other embodiments, a cleavable linker comprises an ester-based cleavable linking group. An ester-based cleavable linking group is cleaved by enzymes such as esterases and amidases in cells. Examples of ester-based cleavable linking groups include, but are not limited to, esters of alkylene, alkenylene and alkynylene groups. Ester cleavable linking groups have the general formula —C(O)O—, or —OC(O)—. These candidates can be evaluated using methods analogous to those described above.

[0628] v. Peptide-Based Cleaving Groups

[0629] In yet other embodiments, a cleavable linker comprises a peptide-based cleavable linking group. A peptide-based cleavable linking group is cleaved by enzymes such as peptidases and proteases in cells. Peptide-based cleavable linking groups are peptide bonds formed between amino acids to yield oligopeptides (e.g., dipeptides, tripeptides etc.) and polypeptides. Peptide-based cleavable groups do not include the amide group (—C(O)NH—). The amide group can be formed between any alkylene, alkenylene or alkynelene. A peptide bond is a special type of amide bond formed between amino acids to yield peptides and proteins. The peptide based cleavage group is generally limited to the peptide bond (i.e., the amide bond) formed between amino acids yielding peptides and proteins and does not include the entire amide functional group. Peptide-based cleavable linking groups have the general formula —NHCHRAC(O)NHCHRBC(O)—, where RA and RB are the R groups of the two adjacent amino acids. These candidates can be evaluated using methods analogous to those described above.

[0630] In some embodiments, an iRNA of the invention is conjugated to a carbohydrate through a linker. Non-limiting examples of iRNA carbohydrate conjugates with linkers of the compositions and methods of the invention include, but are not limited to,

[chemical structure]

[chemical structure]

[chemical structure]

when one of X or Y is an oligonucleotide, the other is a hydrogen.

[0631] In certain embodiments of the compositions and methods of the invention, a ligand is one or more “GalNAc” (N-acetylgalactosamine) derivatives attached through a bivalent or trivalent branched linker.

[0632] In one embodiment, a dsRNA of the invention is conjugated to a bivalent or trivalent branched linker selected from the group of structures shown in any of formula (XLV)-(XLVI):

[chemical structure]

wherein:
[0633] q2A, q2B, q3A, q3B, q4A, q4B, q5A, q5B and q5C represent independently for each occurrence 0-20 and wherein the repeating unit can be the same or different;
[0634] P^{2A}, P^{2B}, P^{3A}, P^{3B}, P^{4A}, P^{4B}, P^{5A}, P^{5B}, P^{5C}, T^{2A}, T^{2B}, T^{3A}, T^{3B}, T^{4A}, T^{4B}, T^{4A}, T^{5B}, T^{5C} are each independently for each occurrence absent, CO, NH, O, S, OC(O), NHC(O), CH₂, CH₂NH or CH₂O;
[0635] Q^{2A}, Q^{2B}, Q^{3A}, Q^{3B}, Q^{4A}, Q^{4B}, Q^{5A}, Q^{5B}, Q^{5C} are independently for each occurrence absent, alkylene, substituted alkylene wherein one or more methylenes can be interrupted or terminated by one or more of O, S, S(O), SO₂, N(R^{N}), C(R′)═C(R″), C≡C or C(O);
[0636] R^{2A}, R^{2B}, R^{3A}, R^{3B}, R^{4A}, R^{4B}, R^{5A}, R^{5B}, R^{5C} are each independently for each occurrence absent, NH, O, S, CH₂, C(O)O, C(O)NH, NHCH(R^{a})C(O), —C(O)—CH(R^{a})—NH—, CO, CH═N—O,

[chemical structure]

or heterocyclyl;
[0637] L^{2A}, L^{2B}, L^{3A}, L^{3B}, L^{4A}, L^{4B}, L^{5A}, L^{5B} and L^{5C} represent the ligand; i.e. each independently for each occurrence a monosaccharide (such as GalNAc), disaccharide, trisaccharide, tetrasaccharide, oligosaccharide, or polysaccharide; and R^{a} is H or amino acid side chain. Trivalent conjugating GalNAc derivatives are particularly useful for use with RNAi agents for inhibiting the expression of a target gene, such as those of formula (XLIX):

[chemical structure]

wherein L^{5A}, L^{5B} and L⁵C represent a monosaccharide, such as GalNAc derivative.

[0638] Examples of suitable bivalent and trivalent branched linker groups conjugating GalNAc derivatives include, but are not limited to, the structures recited above as formulas II, VII, XI, X, and XIII.

[0639] Representative U.S. patents that teach the preparation of RNA conjugates include, but are not limited to, U.S. Pat. Nos. 4,828,979; 4,948,882; 5,218,105; 5,525,465; 5,541,313; 5,545,730; 5,552,538; 5,578,717, 5,580,731; 5,591,584; 5,109,124; 5,118,802; 5,138,045; 5,414,077; 5,486,603; 5,512,439; 5,578,718; 5,608,046; 4,587,044; 4,605,735; 4,667,025; 4,762,779; 4,789,737; 4,824,941; 4,835,263; 4,876,335; 4,904,582; 4,958,013; 5,082,830; 5,112,963; 5,214,136; 5,082,830; 5,112,963; 5,214,136; 5,245,022; 5,254,469; 5,258,506; 5,262,536; 5,272,250; 5,292,873; 5,317,098; 5,371,241, 5,391,723; 5,416,203, 5,451,463; 5,510,475; 5,512,667; 5,514,785; 5,565,552; 5,567,810; 5,574,142; 5,585,481; 5,587,371; 5,595,726; 5,597,696; 5,599,923; 5,599,928; 5,688,941; 6,294,664; 6,320,017; 6,576,752; 6,783,931; 6,900,297; 7,037,646; and 8,106,022, the entire contents of each of which are hereby incorporated herein by reference.

[0640] It is not necessary for all positions in a given compound to be uniformly modified, and in fact more than one of the aforementioned modifications can be incorporated in a single compound or even at a single nucleoside within an iRNA. The present invention also includes iRNA compounds that are chimeric compounds.

[0641] “Chimeric” iRNA compounds or “chimeras,” in the context of this invention, are iRNA compounds, such as, dsRNAi agents, that contain two or more chemically distinct regions, each made up of at least one monomer unit, i.e., a nucleotide in the case of a dsRNA compound. These iRNAs typically contain at least one region wherein the RNA is modified so as to confer upon the iRNA increased resistance to nuclease degradation, increased cellular uptake, or increased binding affinity for the target nucleic acid. An additional region of the iRNA can serve as a substrate for enzymes capable of cleaving RNA:DNA or RNA:RNA hybrids. By way of example, RNase H is a cellular endonuclease which cleaves the RNA strand of an RNA:DNA duplex. Activation of RNase H, therefore, results in cleavage of the RNA target, thereby greatly enhancing the efficiency of iRNA inhibition of gene expression. Consequently, comparable results can often be obtained with shorter iRNAs when chimeric dsRNAs are used, compared to phosphorothioate deoxy dsRNAs hybridizing to the same target region. Cleavage of the RNA target can be routinely detected by gel electrophoresis and, if necessary, associated nucleic acid hybridization techniques known in the art.

[0642] In certain instances, the RNA of an iRNA can be modified by a non-ligand group. A number of non-ligand molecules have been conjugated to iRNAs in order to enhance the activity, cellular distribution or cellular uptake of the iRNA, and procedures for performing such conjugations are available in the scientific literature. Such non-ligand moieties have included lipid moieties, such as cholesterol (Kubo, T. et al., Biochem. Biophys. Res. Comm., 2007, 365(1):54-61; Letsinger et al., Proc. Natl. Acad. Sci. USA, 1989, 86:6553), cholic acid (Manoharan et al., Bioorg. Med. Chem. Lett., 1994, 4:1053), a thioether, e.g., hexyl-S-tritylthiol (Manoharan et al., Ann. N.Y. Acad. Sci., 1992, 660:306; Manoharan et al., Bioorg. Med. Chem. Let., 1993, 3:2765), a thiocholesterol (Oberhauser et al., Nucl. Acids Res., 1992, 20:533), an aliphatic chain, e.g., dodecandiol or undecyl residues (Saison-Behmoaras et al., EMBO J., 1991, 10:111; Kabanov et al., FEBS Lett., 1990, 259:327; Svinarchuk et al., Biochimie, 1993, 75:49), a phospholipid, e.g., di-hexadecyl-rac-glycerol or triethylammonium 1,2-di-O-hexadecyl-rac-glycero-3-H-phosphonate (Manoharan et al., Tetrahedron Lett., 1995, 36:3651; Shea et al., Nucl. Acids Res., 1990, 18:3777), a polyamine or a polyethylene glycol chain (Manoharan et al., Nucleosides & Nucleotides, 1995, 14:969), or adamantane acetic acid (Manoharan et al., Tetrahedron Lett., 1995, 36:3651), a palmityl moiety (Mishra et al., Biochim. Biophys. Acta, 1995, 1264:229), or an octadecylamine or hexylamino-carbonyl-oxycholesterol moiety (Crooke et al., J. Pharmacol. Exp. Ther., 1996, 277:923). Representative United States patents that teach the preparation of such RNA conjugates have been listed above. Typical conjugation protocols involve the synthesis of RNAs bearing an aminolinker at one or more positions of the sequence. The amino group is then reacted with the molecule being conjugated using appropriate coupling or activating reagents. The conjugation reaction can be performed either with the RNA still bound to the solid support or following cleavage of the RNA, in solution phase. Purification of the RNA conjugate by HPLC typically affords the pure conjugate.

### IV. Delivery of an iRNA of the Invention

[0643] The delivery of an iRNA of the invention to a cell e.g., a cell within a subject, such as a human subject (e.g., a subject in need thereof, such as a subject susceptible to or diagnosed with a complement factor B-associated disorder) can be achieved in a number of different ways. For example, delivery may be performed by contacting a cell with an iRNA of the invention either in vitro or in vivo. In vivo delivery may also be performed directly by administering a composition comprising an iRNA, e.g., a dsRNA, to a subject. Alternatively, in vivo delivery may be performed indirectly by administering one or more vectors that encode and direct the expression of the iRNA. These alternatives are discussed further below.

[0644] In general, any method of delivering a nucleic acid molecule (in vitro or in vivo) can be adapted for use with an iRNA of the invention (see e.g., Akhtar S. and Julian R L. (1992) Trends Cell. Biol. 2(5):139-144 and WO94/02595, which are incorporated herein by reference in their entireties). For in vivo delivery, factors to consider in order to deliver an iRNA molecule include, for example, biological stability of the delivered molecule, prevention of non-specific effects, and accumulation of the delivered molecule in the target tissue. RNA interference has also shown success with local delivery to the CNS by direct injection (Dorn, G., et al. (2004) Nucleic Acids 32:e49; Tan, P H., et al (2005) Gene Ther. 12:59-66; Makimura, H., et al (2002) BMC Neurosci. 3:18; Shishkina, G T., et al (2004) Neuroscience 129:521-528; Thakker, E R., et al (2004) Proc. Natl. Acad. Sci. U.S.A. 101:17270-17275; Akaneya, Y., et al (2005) J. Neurophysiol. 93:594-602). Modification of the RNA or the pharmaceutical carrier can also permit targeting of the iRNA to the target tissue and avoid undesirable off-target effects. iRNA molecules can be modified by chemical conjugation to lipophilic groups such as cholesterol to enhance cellular uptake and prevent degradation. For example, an iRNA directed against ApoB conjugated to a lipophilic cholesterol moiety was injected systemically into mice and resulted in knockdown of apoB mRNA in both the liver and jejunum (Soutschek, J., et al (2004) Nature 432:173-178).

[0645] In an alternative embodiment, the iRNA can be delivered using drug delivery systems such as a nanoparticle, a dendrimer, a polymer, liposomes, or a cationic delivery system. Positively charged cationic delivery systems facilitate binding of an iRNA molecule (negatively charged) and also enhance interactions at the negatively charged cell membrane to permit efficient uptake of an iRNA by the cell. Cationic lipids, dendrimers, or polymers can either be bound to an iRNA, or induced to form a vesicle or micelle (see e.g., Kim S H, et al (2008) Journal of Controlled Release 129(2):107-116) that encases an iRNA. The formation of vesicles or micelles further prevents degradation of the iRNA when administered systemically. Methods for making and administering cationic-iRNA complexes are well within the abilities of one skilled in the art (see e.g., Sorensen, D R, et al (2003) J. Mol. Biol 327:761-766; Verma, U N, et al (2003) Clin. Cancer Res. 9:1291-1300; Arnold, A S et al (2007) J. Hypertens. 25:197-205, which are incorporated herein by reference in their entirety). Some non-limiting examples of drug delivery systems useful for systemic delivery of iRNAs include DOTAP (Sorensen, D R., et al (2003), supra; Verma, U N, et al (2003), supra), “solid nucleic acid lipid particles” (Zimmermann, T S, et al (2006) Nature 441:111-114), cardiolipin (Chien, P Y, et al (2005) Cancer Gene Ther. 12:321-328; Pal, A, et al (2005) Int J. Oncol. 26:1087-1091), polyethyleneimine (Bonnet M E, et al (2008) Pharm. Res. August 16 Epub ahead of print; Aigner, A. (2006) J. Biomed. Biotechnol. 71659), Arg-Gly-Asp (RGD) peptides (Liu, S. (2006) Mol. Pharm. 3:472-487), and polyamidoamines (Tomalia, D A, et al (2007) Biochem. Soc. Trans. 35:61-67; Yoo, H., et al (1999) Pharm. Res. 16:1799-1804). In some embodiments, an iRNA forms a complex with cyclodextrin for systemic administration. Methods for administration and pharmaceutical compositions of iRNAs and cyclodextrins can be found in U.S. Pat. No. 7,427,605, which is herein incorporated by reference in its entirety.

[0646] A. Vector encoded iRNAs of the Invention

[0647] iRNA targeting the complement factor B gene can be expressed from transcription units inserted into DNA or RNA vectors (see, e.g., Couture, A, et al., TIG. (1996), 12:5-10; Skillern, A, et al., International PCT Publication No. WO 00/22113, Conrad, International PCT Publication No. WO 00/22114, and Conrad, U.S. Pat. No. 6,054,299). Expression can be transient (on the order of hours to weeks) or sustained (weeks to months or longer), depending upon the specific construct used and the target tissue or cell type. These transgenes can be introduced as a linear construct, a circular plasmid, or a viral vector, which can be an integrating or non-integrating vector. The transgene can also be constructed to permit it to be inherited as an extrachromosomal plasmid (Gassmann, et al., Proc. Natl. Acad. Sci. USA (1995) 92:1292).

[0648] Viral vector systems which can be utilized with the methods and compositions described herein include, but are not limited to, (a) adenovirus vectors; (b) retrovirus vectors, including but not limited to lentiviral vectors, moloney murine leukemia virus, etc.; (c) adeno-associated virus vectors; (d) herpes simplex virus vectors; (e) SV 40 vectors; (f) polyoma virus vectors; (g) papilloma virus vectors; (h) picornavirus vectors; (i) pox virus vectors such as an orthopox, e.g., vaccinia virus vectors or avipox, e.g. canary pox or fowl pox; and (j) a helper-dependent or gutless adenovirus. Replication-defective viruses can also be advantageous. Different vectors will or will not become incorporated into the cells' genome. The constructs can include viral sequences for transfection, if desired. Alternatively, the construct can be incorporated into vectors capable of episomal replication, e.g. EPV and EBV vectors. Constructs for the recombinant expression of an iRNA will generally require regulatory elements, e.g., promoters, enhancers, etc., to ensure the expression of the iRNA in target cells. Other aspects to consider for vectors and constructs are known in the art.

### V. Pharmaceutical Compositions of the Invention

[0649] The present invention also includes pharmaceutical compositions and formulations which include the iRNAs of the invention. In one embodiment, provided herein are pharmaceutical compositions containing an iRNA, as described herein, and a pharmaceutically acceptable carrier. The pharmaceutical compositions containing the iRNA are useful for preventing or treating a complement factor B-associated disorder. Such pharmaceutical compositions are formulated based on the mode of delivery. One example is compositions that are formulated for systemic administration via parenteral delivery, e.g., by subcutaneous (SC), intramuscular (IM), or intravenous (IV) delivery. The pharmaceutical compositions of the invention may be administered in dosages sufficient to inhibit expression of a complement factor B gene.

[0650] In some embodiments, the pharmaceutical compositions of the invention are sterile. In another embodiment, the pharmaceutical compositions of the invention are pyrogen free.

[0651] The pharmaceutical compositions of the invention may be administered in dosages sufficient to inhibit expression of a complement factor B gene. In general, a suitable dose of an iRNA of the invention will be in the range of about 0.001 to about 200.0 milligrams per kilogram body weight of the recipient per day, generally in the range of about 1 to 50 mg per kilogram body weight per day. Typically, a suitable dose of an iRNA of the invention will be in the range of about 0.1 mg/kg to about 5.0 mg/kg, such as, about 0.3 mg/kg and about 3.0 mg/kg. A repeat-dose regimen may include administration of a therapeutic amount of iRNA on a regular basis, such as every month, once every 3-6 months, or once a year. In certain embodiments, the iRNA is administered about once per month to about once per six months.

[0652] After an initial treatment regimen, the treatments can be administered on a less frequent basis. Duration of treatment can be determined based on the severity of disease.

[0653] In other embodiments, a single dose of the pharmaceutical compositions can be long lasting, such that doses are administered at not more than 1, 2, 3, or 4 month intervals. In some embodiments of the invention, a single dose of the pharmaceutical compositions of the invention is administered about once per month. In other embodiments of the invention, a single dose of the pharmaceutical compositions of the invention is administered quarterly (i.e., about every three months). In other embodiments of the invention, a single dose of the pharmaceutical compositions of the invention is administered twice per year (i.e., about once every six months).

[0654] The skilled artisan will appreciate that certain factors can influence the dosage and timing required to effectively treat a subject, including but not limited to mutations present in the subject, previous treatments, the general health or age of the subject, and other diseases present. Moreover, treatment of a subject with a prophylactically or therapeutically effective amount, as appropriate, of a composition can include a single treatment or a series of treatments.

[0655] The iRNA can be delivered in a manner to target a particular tissue (e.g., hepatocytes).

[0656] Pharmaceutical compositions of the present invention include, but are not limited to, solutions, emulsions, and liposome-containing formulations. These compositions can be generated from a variety of components that include, but are not limited to, preformed liquids, self-emulsifying solids, and self-emulsifying semisolids. Formulations include those that target the liver.

[0657] The pharmaceutical formulations of the present invention, which can conveniently be presented in unit dosage form, can be prepared according to conventional techniques well known in the pharmaceutical industry. Such techniques include the step of bringing into association the active ingredients with the pharmaceutical carrier(s) or excipient(s). In general, the formulations are prepared by uniformly and intimately bringing into association the active ingredients with liquid carriers.

[0658] A. Additional Formulations

[0659] i. Emulsions

[0660] The compositions of the present invention can be prepared and formulated as emulsions. Emulsions are typically heterogeneous systems of one liquid dispersed in another in the form of droplets usually exceeding 0.1 μm in diameter (see e.g., Ansel's Pharmaceutical Dosage Forms and Drug Delivery Systems, Allen, L V., Popovich N G., and Ansel H C., 2004, Lippincott Williams & Wilkins (8th ed.), New York, NY; Idson, in Pharmaceutical Dosage Forms, Lieberman, Rieger and Banker (Eds.), 1988, Marcel Dekker, Inc., New York, N.Y., volume 1, p. 199; Rosoff, in Pharmaceutical Dosage Forms, Lieberman, Rieger and Banker (Eds.), 1988, Marcel Dekker, Inc., New York, N.Y., Volume 1, p. 245; Block in Pharmaceutical Dosage Forms, Lieberman, Rieger and Banker (Eds.), 1988, Marcel Dekker, Inc., New York, N.Y., volume 2, p. 335; Higuchi et al., in Remington's Pharmaceutical Sciences, Mack Publishing Co., Easton, Pa., 1985, p. 301). Emulsions are often biphasic systems comprising two immiscible liquid phases intimately mixed and dispersed with each other. In general, emulsions can be of either the water-in-oil (w/o) or the oil-in-water (o/w) variety. When an aqueous phase is finely divided into and dispersed as minute droplets into a bulk oily phase, the resulting composition is called a water-in-oil (w/o) emulsion. Alternatively, when an oily phase is finely divided into and dispersed as minute droplets into a bulk aqueous phase, the resulting composition is called an oil-in-water (o/w) emulsion. Emulsions can contain additional components in addition to the dispersed phases, and the active drug which can be present as a solution either in the aqueous phase, oily phase or itself as a separate phase. Pharmaceutical excipients such as emulsifiers, stabilizers, dyes, and anti-oxidants can also be present in emulsions as needed. Pharmaceutical emulsions can also be multiple emulsions that are comprised of more than two phases such as, for example, in the case of oil-in-water-in-oil (o/w/o) and water-in-oil-in-water (w/o/w) emulsions. Such complex formulations often provide certain advantages that simple binary emulsions do not. Multiple emulsions in which individual oil droplets of an o/w emulsion enclose small water droplets constitute a w/o/w emulsion. Likewise a system of oil droplets enclosed in globules of water stabilized in an oily continuous phase provides an o/w/o emulsion.

[0661] Emulsions are characterized by little or no thermodynamic stability. Often, the dispersed or discontinuous phase of the emulsion is well dispersed into the external or continuous phase and maintained in this form through the means of emulsifiers or the viscosity of the formulation. Other means of stabilizing emulsions entail the use of emulsifiers that can be incorporated into either phase of the emulsion. Emulsifiers can broadly be classified into four categories: synthetic surfactants, naturally occurring emulsifiers, absorption bases, and finely dispersed solids (see e.g., Ansel's Pharmaceutical Dosage Forms and Drug Delivery Systems, Allen, LV., Popovich N G., and Ansel H C., 2004, Lippincott Williams & Wilkins (8th ed.), New York, NY; Idson, in Pharmaceutical Dosage Forms, Lieberman, Rieger and Banker (Eds.), 1988, Marcel Dekker, Inc., New York, N.Y., volume 1, p. 199).

[0662] Synthetic surfactants, also known as surface active agents, have found wide applicability in the formulation of emulsions and have been reviewed in the literature (see e.g., Ansel's Pharmaceutical Dosage Forms and Drug Delivery Systems, Allen, LV., Popovich N G., and Ansel H C., 2004, Lippincott Williams & Wilkins (8th ed.), New York, NY; Rieger, in Pharmaceutical Dosage Forms, Lieberman, Rieger and Banker (Eds.), 1988, Marcel Dekker, Inc., New York, N.Y., volume 1, p. 285; Idson, in Pharmaceutical Dosage Forms, Lieberman, Rieger and Banker (Eds.), Marcel Dekker, Inc., New York, N.Y., 1988, volume 1, p. 199). Surfactants are typically amphiphilic and comprise a hydrophilic and a hydrophobic portion. The ratio of the hydrophilic to the hydrophobic nature of the surfactant has been termed the hydrophile/lipophile balance (HLB) and is a valuable tool in categorizing and selecting surfactants in the preparation of formulations. Surfactants can be classified into different classes based on the nature of the hydrophilic group: nonionic, anionic, cationic, and amphoteric (see e.g., Ansel's Pharmaceutical Dosage Forms and Drug Delivery Systems, Allen, LV., Popovich N G., and Ansel H C., 2004, Lippincott Williams & Wilkins (8th ed.), New York, NY Rieger, in Pharmaceutical Dosage Forms, Lieberman, Rieger and Banker (Eds.), 1988, Marcel Dekker, Inc., New York, N.Y., volume 1, p. 285).

[0663] A large variety of non-emulsifying materials are also included in emulsion formulations and contribute to the properties of emulsions. These include fats, oils, waxes, fatty acids, fatty alcohols, fatty esters, humectants, hydrophilic colloids, preservatives, and antioxidants (Block, in Pharmaceutical Dosage Forms, Lieberman, Rieger and Banker (Eds.), 1988, Marcel Dekker, Inc., New York, N.Y., volume 1, p. 335; Idson, in Pharmaceutical Dosage Forms, Lieberman, Rieger and Banker (Eds.), 1988, Marcel Dekker, Inc., New York, N.Y., volume 1, p. 199).

[0664] The application of emulsion formulations via dermatological, oral, and parenteral routes, and methods for their manufacture have been reviewed in the literature (see e.g., Ansel's Pharmaceutical Dosage Forms and Drug Delivery Systems, Allen, LV., Popovich N G., and Ansel H C., 2004, Lippincott Williams & Wilkins (8th ed.), New York, NY; Idson, in Pharmaceutical Dosage Forms, Lieberman, Rieger and Banker (Eds.), 1988, Marcel Dekker, Inc., New York, N.Y., volume 1, p. 199).

[0665] ii. Microemulsions

[0666] In one embodiment of the present invention, the compositions of iRNAs and nucleic acids are formulated as microemulsions. A microemulsion can be defined as a system of water, oil, and amphiphile which is a single optically isotropic and thermodynamically stable liquid solution (see e.g., Ansel's Pharmaceutical Dosage Forms and Drug Delivery Systems, Allen, LV., Popovich N G., and Ansel H C., 2004, Lippincott Williams & Wilkins (8th ed.), New York, NY; Rosoff, in Pharmaceutical Dosage Forms, Lieberman, Rieger and Banker (Eds.), 1988, Marcel Dekker, Inc., New York, N.Y., volume 1, p. 245). Typically microemulsions are systems that are prepared by first dispersing an oil in an aqueous surfactant solution and then adding a sufficient amount of a fourth component, generally an intermediate chain-length alcohol to form a transparent system. Therefore, microemulsions have also been described as thermodynamically stable, isotropically clear dispersions of two immiscible liquids that are stabilized by interfacial films of surface-active molecules (Leung and Shah, in: Controlled Release of Drugs: Polymers and Aggregate Systems, Rosoff, M., Ed., 1989, VCH Publishers, New York, pages 185-215).

[0667] iii. Microparticles

[0668] An iRNA of the invention may be incorporated into a particle, e.g., a microparticle. Microparticles can be produced by spray-drying, but may also be produced by other methods including lyophilization, evaporation, fluid bed drying, vacuum drying, or a combination of these techniques.

[0669] iv. Penetration Enhancers

[0670] In one embodiment, the present invention employs various penetration enhancers to effect the efficient delivery of nucleic acids, particularly iRNAs, to the skin of animals. Most drugs are present in solution in both ionized and nonionized forms. However, usually only lipid soluble or lipophilic drugs readily cross cell membranes. It has been discovered that even non-lipophilic drugs can cross cell membranes if the membrane to be crossed is treated with a penetration enhancer. In addition to aiding the diffusion of non-lipophilic drugs across cell membranes, penetration enhancers also enhance the permeability of lipophilic drugs.

[0671] Penetration enhancers can be classified as belonging to one of five broad categories, i.e., surfactants, fatty acids, bile salts, chelating agents, and non-chelating non-surfactants (see e.g., Malmsten, M. Surfactants and polymers in drug delivery, Informa Health Care, New York, NY, 2002; Lee et al., Critical Reviews in Therapeutic Drug Carrier Systems, 1991, p. 92). Each of the above mentioned classes of penetration enhancers and their use in manufacture of pharmaceutical compositions and delivery of pharmaceutical agents are well known in the art.

[0672] v. Excipients

[0673] In contrast to a carrier compound, a “pharmaceutical carrier” or “excipient” is a pharmaceutically acceptable solvent, suspending agent, or any other pharmacologically inert vehicle for delivering one or more nucleic acids to an animal. The excipient can be liquid or solid and is selected, with the planned manner of administration in mind, so as to provide for the desired bulk, consistency, etc., when combined with a nucleic acid and the other components of a given pharmaceutical composition. Such agent are well known in the art.

[0674] vi. Other Components

[0675] The compositions of the present invention can additionally contain other adjunct components conventionally found in pharmaceutical compositions, at their art-established usage levels. Thus, for example, the compositions can contain additional, compatible, pharmaceutically-active materials such as, for example, antipruritics, astringents, local anesthetics or anti-inflammatory agents, or can contain additional materials useful in physically formulating various dosage forms of the compositions of the present invention, such as dyes, flavoring agents, preservatives, antioxidants, opacifiers, thickening agents and stabilizers. However, such materials, when added, should not unduly interfere with the biological activities of the components of the compositions of the present invention. The formulations can be sterilized and, if desired, mixed with auxiliary agents, e.g., lubricants, preservatives, stabilizers, wetting agents, emulsifiers, salts for influencing osmotic pressure, buffers, colorings, flavorings, or aromatic substances, and the like which do not deleteriously interact with the nucleic acid(s) of the formulation.

[0676] Aqueous suspensions can contain substances which increase the viscosity of the suspension including, for example, sodium carboxymethylcellulose, sorbitol, or dextran. The suspension can also contain stabilizers.

[0677] In some embodiments, pharmaceutical compositions featured in the invention include (a) one or more iRNA and (b) one or more agents which function by a non-iRNA mechanism and which are useful in treating a complement factor B-associated disorder.

[0678] Toxicity and prophylactic efficacy of such compounds can be determined by standard pharmaceutical procedures in cell cultures or experimental animals, e.g., for determining the LD50 (the dose lethal to 50% of the population) and the ED50 (the dose prophylactically effective in 50% of the population). The dose ratio between toxic and therapeutic effects is the therapeutic index and it can be expressed as the ratio LD50/ED50. Compounds that exhibit high therapeutic indices are preferred.

[0679] The data obtained from cell culture assays and animal studies can be used in formulating a range of dosage for use in humans. The dosage of compositions featured herein in the invention lies generally within a range of circulating concentrations that include the ED50, such as an ED80 or ED90, with little or no toxicity. The dosage can vary within this range depending upon the dosage form employed and the route of administration utilized. For any compound used in the methods featured in the invention, the prophylactically effective dose can be estimated initially from cell culture assays. A dose can be formulated in animal models to achieve a circulating plasma concentration range of the compound or, when appropriate, of the polypeptide product of a target sequence (e.g., achieving a decreased concentration of the polypeptide) that includes the IC50 (i.e., the concentration of the test compound which achieves a half-maximal inhibition of symptoms) or higher levels of inhibition as determined in cell culture. Such information can be used to more accurately determine useful doses in humans. Levels in plasma can be measured, for example, by high performance liquid chromatography.

[0680] In addition to their administration, as discussed above, the iRNAs featured in the invention can be administered in combination with other known agents used for the prevention or treatment of a complement factor B-associated disorder. In any event, the administering physician can adjust the amount and timing of iRNA administration on the basis of results observed using standard measures of efficacy known in the art or described herein.

### VI. Methods for Inhibiting Complement Factor B Expression

[0681] The present invention also provides methods of inhibiting expression of a CFB gene in a cell. The methods include contacting a cell with an RNAi agent, e.g., double stranded RNA agent, in an amount effective to inhibit expression of CFB in the cell, thereby inhibiting expression of CFB in the cell.

[0682] Contacting of a cell with an iRNA, e.g., a double stranded RNA agent, may be done in vitro or in vivo. Contacting a cell in vivo with the iRNA includes contacting a cell or group of cells within a subject, e.g., a human subject, with the iRNA. Combinations of in vitro and in vivo methods of contacting a cell are also possible. Contacting a cell may be direct or indirect, as discussed above. Furthermore, contacting a cell may be accomplished via a targeting ligand, including any ligand described herein or known in the art. In certain embodiments, the targeting ligand is a carbohydrate moiety, e.g., a GalNAc ligand, or any other ligand that directs the RNAi agent to a site of interest.

[0683] The term “inhibiting,” as used herein, is used interchangeably with “reducing,” “silencing,” “downregulating”, “suppressing”, and other similar terms, and includes any level of inhibition.

[0684] The phrase “inhibiting expression of a complement factor B gene” is intended to refer to inhibition of expression of any complement factor B gene (such as, e.g., a mouse complement factor B gene, a rat complement factor B gene, a monkey complement factor B gene, or a human complement factor B gene) as well as variants or mutants of a complement factor B gene. Thus, the complement factor B gene may be a wild-type complement factor B gene, a mutant complement factor B gene, or a transgenic complement factor B gene in the context of a genetically manipulated cell, group of cells, or organism.

[0685] “Inhibiting expression of a complement factor B gene” includes any level of inhibition of a complement factor B gene, e.g., at least partial suppression of the expression of a complement factor B gene, such as a clinically relevant level of supression. The expression of the complement factor B gene may be assessed based on the level, or the change in the level, of any variable associated with complement factor B gene expression, e.g., complement factor B mRNA level or complement factor B protein level, or, for example, CH₅₀ activity as a measure of total hemolytic complement, AH₅₀ to measure the hemolytic activity of the alternate pathway of complement, or lactate dehydrogenase (LDH) levels as a measure of intravascular hemolysis, or hemoglobin levels. Levels of C3, C9, C5, C5a, C5b, and soluble C5b-9 complex may also be measured to assess CFB expression. Inhibition may be assessed by a decrease in an absolute or relative level of one or more of these variables compared with a control level. This level may be assessed in an individual cell or in a group of cells, including, for example, a sample derived from a subject. It is understood that complement factor B is expressed predominantly in the liver, and is present in circulation.

[0686] Inhibition may be assessed by a decrease in an absolute or relative level of one or more variables that are associated with complement factor B expression compared with a control level. The control level may be any type of control level that is utilized in the art, e.g., a pre-dose baseline level, or a level determined from a similar subject, cell, or sample that is untreated or treated with a control (such as, e.g., buffer only control or inactive agent control).

[0687] In some embodiments of the methods of the invention, expression of a complement factor B gene is inhibited by at least 50%, 55%, 60%, 65%, 70%, 75%, 80%, 85%, 90%, or 95%, or to below the level of detection of the assay. In certain embodiments, expression of a complement factor B gene is inhibited by at least 70%. It is further understood that inhibition of complement factor B expression in certain tissues, e.g., in gall bladder, without a significant inhibition of expression in other tissues, e.g., brain, may be desirable. In certain embodiments, expression level is determined using the assay method provided in Example 2 with a 10 nM siRNA concentration in the appropriate species matched cell line.

[0688] In certain embodiments, inhibition of expression in vivo is determined by knockdown of the human gene in a rodent expressing the human gene, e.g., an AAV-infected mouse expressing the human target gene (i.e., complement factor B), e.g., when administered as a single dose, e.g., at 3 mg/kg at the nadir of RNA expression. Knockdown of expression of an endogenous gene in a model animal system can also be determined, e.g., after administration of a single dose at, e.g., 3 mg/kg at the nadir of RNA expression. Such systems are useful when the nucleic acid sequence of the human gene and the model animal gene are sufficiently close such that the human iRNA provides effective knockdown of the model animal gene. RNA expression in liver is determined using the PCR methods provided in Example 2.

[0689] Inhibition of the expression of a complement factor B gene may be manifested by a reduction of the amount of mRNA expressed by a first cell or group of cells (such cells may be present, for example, in a sample derived from a subject) in which a complement factor B gene is transcribed and which has or have been treated (e.g., by contacting the cell or cells with an iRNA of the invention, or by administering an iRNA of the invention to a subject in which the cells are or were present) such that the expression of a complement factor B gene is inhibited, as compared to a second cell or group of cells substantially identical to the first cell or group of cells but which has not or have not been so treated (control cell(s) not treated with an iRNA or not treated with an iRNA targeted to the gene of interest). In certain embodiments, the inhibition is assessed by the method provided in Example 2 using a 10 nM siRNA concentration in the species matched cell line and expressing the level of mRNA in treated cells as a percentage of the level of mRNA in control cells, using the following formula:

$$\frac{( mRNA in control cells ) - ( mRNA in treated cells )}{( mRNA in control cells )} •100 \%$$

[0690] In other embodiments, inhibition of the expression of a complement factor B gene may be assessed in terms of a reduction of a parameter that is functionally linked to complement factor B gene expression, e.g., complement factor B protein level in blood or serum from a subject. Complement factor B gene silencing may be determined in any cell expressing complement factor B, either endogenous or heterologous from an expression construct, and by any assay known in the art.

[0691] Inhibition of the expression of a complement factor B protein may be manifested by a reduction in the level of the complement factor B protein that is expressed by a cell or group of cells or in a subject sample (e.g., the level of protein in a blood sample derived from a subject). As explained above, for the assessment of mRNA suppression, the inhibition of protein expression levels in a treated cell or group of cells may similarly be expressed as a percentage of the level of protein in a control cell or group of cells, or the change in the level of protein in a subject sample, e.g., blood or serum derived therefrom.

[0692] A control cell, a group of cells, or subject sample that may be used to assess the inhibition of the expression of a complement factor B gene includes a cell, group of cells, or subject sample that has not yet been contacted with an RNAi agent of the invention. For example, the control cell, group of cells, or subject sample may be derived from an individual subject (e.g., a human or animal subject) prior to treatment of the subject with an RNAi agent or an appropriately matched population control.

[0693] The level of complement factor B mRNA that is expressed by a cell or group of cells may be determined using any method known in the art for assessing mRNA expression. In one embodiment, the level of expression of complement factor B in a sample is determined by detecting a transcribed polynucleotide, or portion thereof, e.g., mRNA of the complement factor B gene. RNA may be extracted from cells using RNA extraction techniques including, for example, using acid phenol/guanidine isothiocyanate extraction (RNAzol B; Biogenesis), RNeasy™ RNA preparation kits (Qiagen®) or PAXgene™ (PreAnalytix™, Switzerland). Typical assay formats utilizing ribonucleic acid hybridization include nuclear run-on assays, RT-PCR, RNase protection assays, northern blotting, in situ hybridization, and microarray analysis.

[0694] In some embodiments, the level of expression of complement factor B is determined using a nucleic acid probe. The term “probe”, as used herein, refers to any molecule that is capable of selectively binding to a specific complement factor B. Probes can be synthesized by one of skill in the art, or derived from appropriate biological preparations. Probes may be specifically designed to be labeled. Examples of molecules that can be utilized as probes include, but are not limited to, RNA, DNA, proteins, antibodies, and organic molecules.

[0695] Isolated mRNA can be used in hybridization or amplification assays that include, but are not limited to, Southern or northern analyses, polymerase chain reaction (PCR) analyses and probe arrays. One method for the determination of mRNA levels involves contacting the isolated mRNA with a nucleic acid molecule (probe) that can hybridize to complement factor B mRNA. In one embodiment, the mRNA is immobilized on a solid surface and contacted with a probe, for example by running the isolated mRNA on an agarose gel and transferring the mRNA from the gel to a membrane, such as nitrocellulose. In an alternative embodiment, the probe(s) are immobilized on a solid surface and the mRNA is contacted with the probe(s), for example, in an Affymetrix® gene chip array. A skilled artisan can readily adapt known mRNA detection methods for use in determining the level of complement factor B mRNA.

[0696] An alternative method for determining the level of expression of complement factor B in a sample involves the process of nucleic acid amplification or reverse transcriptase (to prepare cDNA) of for example mRNA in the sample, e.g., by RT-PCR (the experimental embodiment set forth in Mullis, 1987, U.S. Pat. No. 4,683,202), ligase chain reaction (Barany (1991) Proc. Natl. Acad. Sci. USA 88:189-193), self sustained sequence replication (Guatelli et al. (1990) Proc. Natl. Acad. Sci. USA 87:1874-1878), transcriptional amplification system (Kwoh et al. (1989) Proc. Natl. Acad. Sci. USA 86:1173-1177), Q-Beta Replicase (Lizardi et al. (1988) Bio/Technology 6:1197), rolling circle replication (Lizardi et al., U.S. Pat. No. 5,854,033) or any other nucleic acid amplification method, followed by the detection of the amplified molecules using techniques well known to those of skill in the art. These detection schemes are especially useful for the detection of nucleic acid molecules if such molecules are present in very low numbers. In particular aspects of the invention, the level of expression of CFB is determined by quantitative fluorogenic RT-PCR (i.e., the TaqMan™ System). In certain embodiments, expression level is determined by the method provided in Example 2 using, e.g., a 10 nM siRNA concentration, in the species matched cell line.

[0697] The expression levels of complement factor B mRNA may be monitored using a membrane blot (such as used in hybridization analysis such as northern, Southern, dot, and the like), or microwells, sample tubes, gels, beads or fibers (or any solid support comprising bound nucleic acids). See U.S. Pat. Nos. 5,770,722, 5,874,219, 5,744,305, 5,677,195 and 5,445,934, which are incorporated herein by reference. The determination of complement factor B expression level may also comprise using nucleic acid probes in solution.

[0698] In certain embodiments, the level of mRNA expression is assessed using branched DNA (bDNA) assays or real time PCR (qPCR). The use of these methods is described and exemplified in the Examples presented herein. In certain embodiments, expression level is determined by the method provided in Example 2 using a 10 nM siRNA concentration in the species matched cell line.

[0699] The level of CFB protein expression may be determined using any method known in the art for the measurement of protein levels. Such methods include, for example, electrophoresis, capillary electrophoresis, high performance liquid chromatography (HPLC), thin layer chromatography (TLC), hyperdiffusion chromatography, fluid or gel precipitin reactions, absorption spectroscopy, a colorimetric assays, spectrophotometric assays, flow cytometry, immunodiffusion (single or double), immunoelectrophoresis, western blotting, radioimmunoassay (RIA), enzyme-linked immunosorbent assays (ELISAs), immunofluorescent assays, electrochemiluminescence assays, and the like.

[0700] In some embodiments, the efficacy of the methods of the invention are assessed by a decrease in CFB mRNA or protein level (e.g., in a liver biopsy).

[0701] In some embodiments of the methods of the invention, the iRNA is administered to a subject such that the iRNA is delivered to a specific site within the subject. The inhibition of expression of complement factor B may be assessed using measurements of the level or change in the level of complement factor B mRNA or complement factor B protein in a sample derived from fluid or tissue from the specific site within the subject (e.g., liver or blood).

[0702] As used herein, the terms detecting or determining a level of an analyte are understood to mean performing the steps to determine if a material, e.g., protein, RNA, is present. As used herein, methods of detecting or determining include detection or determination of an analyte level that is below the level of detection for the method used.

### VII. Prophylactic and Treatment Methods of the Invention

[0703] The present invention also provides methods of using an iRNA of the invention or a composition containing an iRNA of the invention to inhibit expression of complement factor B, thereby preventing or treating a complement factor B-associated disorder, e.g., paroxysmal nocturnal hemoglobinuria (PNH), atypical hemolytic uremic syndrome (aHUS), asthma, rheumatoid arthritis (RA); antiphospholipid antibody syndrome; lupus nephritis; ischemia-reperfusion injury; typical or infectious hemolytic uremic syndrome (tHUS); dense deposit disease (DDD); neuromyelitis optica (NMO); multifocal motor neuropathy (MMN); multiple sclerosis (MS); macular degeneration (e.g., age-related macular degeneration (AMD)); hemolysis, elevated liver enzymes, and low platelets (HELLP) syndrome; thrombotic thrombocytopenic purpura (TTP); spontaneous fetal loss; Pauci-immune vasculitis; epidermolysis bullosa; recurrent fetal loss; pre-eclampsia, traumatic brain injury, myasthenia gravis, cold agglutinin disease, dermatomyositis bullous pemphigoid, Shiga toxin E. coli-related hemolytic uremic syndrome, C3 neuropathy, anti-neutrophil cytoplasmic antibody-associated vasculitis (e.g., granulomatosis with polyangiitis (previously known as Wegener granulomatosis), Churg-Strauss syndrome, and microscopic polyangiitis), humoral and vascular transplant rejection, graft dysfunction, myocardial infarction (e.g., tissue damage and ischemia in myocardial infarction), an allogenic transplant, sepsis (e.g., poor outcome in sepsis), Coronary artery disease, dermatomyositis, Graves' disease, atherosclerosis, Alzheimer's disease, systemic inflammatory response sepsis, septic shock, spinal cord injury, glomerulonephritis, Hashimoto's thyroiditis, type I diabetes, psoriasis, pemphigus, autoimmune hemolytic anemia (AIHA), ITP, Goodpasture syndrome, Degos disease, antiphospholipid syndrome (APS), catastrophic APS (CAPS), a cardiovascular disorder, myocarditis, a cerebrovascular disorder, a peripheral (e.g., musculoskeletal) vascular disorder, a renovascular disorder, a mesenteric/enteric vascular disorder, vasculitis, Henoch-Schönlein purpura nephritis, systemic lupus erythematosus-associated vasculitis, vasculitis associated with rheumatoid arthritis, immune complex vasculitis, Takayasu's disease, dilated cardiomyopathy, diabetic angiopathy, Kawasaki's disease (arteritis), venous gas embolus (VGE), and restenosis following stent placement, rotational atherectomy, and percutaneous transluminal coronary angioplasty (PTCA) (see, e.g., Holers (2008) Immunological Reviews 223:300-316; Holers and Thurman (2004) Molecular Immunology 41:147-152; U.S. Patent Publication No. 20070172483).

[0704] In one embodiment, the complement factor B-associate disease is selected from the group consisting of C3 glomerulopathy, systemic lupus erythematosus (SLE), e.g., Lupus Nephritis, IgA nephropathy, diabetic nephropathy, polycystic kidney disease, membranous nephropathy, age-related macular degeneration, atypical hemolytic uremic syndrome, thrombotic microangiopathy, myasthenia gravis, ischemia and reperfusion injury, paroxysmal nocturnal hemoglobinuria, and rheumatoid arthritis

[0705] In another embodiment, the complement factor B-associate disease is selected from the group consisting of C3 glomerulopathy, systemic lupus erythematosus (SLE), e.g., Lupus Nephritis, IgA nephropathy, diabetic nephropathy, and polycystic kidney disease.

[0706] In the methods of the invention the cell may be contacted with the siRNA in vitro or in vivo, i.e., the cell may be within a subject.

[0707] A cell suitable for treatment using the methods of the invention may be any cell that expresses a complement factor B gene, e.g., a liver cell, a brain cell, a gall bladder cell, a heart cell, or a kidney cell. In one embodiment, the cell is a liver cell. A cell suitable for use in the methods of the invention may be a mammalian cell, e.g., a primate cell (such as a human cell, including human cell in a chimeric non-human animal, or a non-human primate cell, e.g., a monkey cell or a chimpanzee cell), or a non-primate cell. In certain embodiments, the cell is a human cell, e.g., a human liver cell. In the methods of the invention, complement factor B expression is inhibited in the cell by at least 50, 55, 60, 65, 70, 75, 80, 85, 90, or 95, or to a level below the level of detection of the assay.

[0708] The in vivo methods of the invention may include administering to a subject a composition containing an iRNA, where the iRNA includes a nucleotide sequence that is complementary to at least a part of an RNA transcript of the complement factor B gene of the mammal to which the RNAi agent is to be administered. The composition can be administered by any means known in the art including, but not limited to oral, intraperitoneal, or parenteral routes, including intracranial (e.g., intraventricular, intraparenchymal, and intrathecal), intravenous, intramuscular, subcutaneous, transdermal, airway (aerosol), nasal, rectal, and topical (including buccal and sublingual) administration. In certain embodiments, the compositions are administered by intravenous infusion or injection. In certain embodiments, the compositions are administered by subcutaneous injection. In certain embodiments, the compositions are administered by intramuscular injection.

[0709] In some embodiments, the administration is via a depot injection. A depot injection may release the iRNA in a consistent way over a prolonged time period. Thus, a depot injection may reduce the frequency of dosing needed to obtain a desired effect, e.g., a desired inhibition of CFB, or a therapeutic or prophylactic effect. A depot injection may also provide more consistent serum concentrations. Depot injections may include subcutaneous injections or intramuscular injections. In certain embodiments, the depot injection is a subcutaneous injection.

[0710] In some embodiments, the administration is via a pump. The pump may be an external pump or a surgically implanted pump. In certain embodiments, the pump is a subcutaneously implanted osmotic pump. In other embodiments, the pump is an infusion pump. An infusion pump may be used for intravenous, subcutaneous, arterial, or epidural infusions. In certain embodiments, the infusion pump is a subcutaneous infusion pump. In other embodiments, the pump is a surgically implanted pump that delivers the iRNA to the liver.

[0711] The mode of administration may be chosen based upon whether local or systemic treatment is desired and based upon the area to be treated. The route and site of administration may be chosen to enhance targeting.

[0712] In one aspect, the present invention also provides methods for inhibiting the expression of a complement factor B gene in a mammal. The methods include administering to the mammal a composition comprising a dsRNA that targets a complement factor B gene in a cell of the mammal and maintaining the mammal for a time sufficient to obtain degradation of the mRNA transcript of the complement factor B gene, thereby inhibiting expression of the complement factor B gene in the cell. Reduction in gene expression can be assessed by any methods known in the art and by methods, e.g. qRT-PCR, described herein, e.g., in Example 2. Reduction in protein production can be assessed by any methods known it the art, e.g. ELISA. In certain embodiments, a puncture liver biopsy sample serves as the tissue material for monitoring the reduction in the complement factor B gene or protein expression. In other embodiments, a blood sample serves as the subject sample for monitoring the reduction in the complement factor B protein expression.

[0713] The present invention further provides methods of treatment in a subject in need thereof, e.g., a subject diagnosed with a complement factor B-associated disorder, such as, C3 glomerulopathy, systemic lupus erythematosus (SLE), e.g., Lupus Nephritis, IgA nephropathy, diabetic nephropathy, and polycystic kidney disease.

[0714] The present invention further provides methods of prophylaxis in a subject in need thereof. The treatment methods of the invention include administering an iRNA of the invention to a subject, e.g., a subject that would benefit from a reduction of complement factor B expression, in a prophylactically effective amount of an iRNA targeting a complement factor B gene or a pharmaceutical composition comprising an iRNA targeting a complement factor B gene.

[0715] In one embodiment, a complement factor B-associated disease is selected from the group consisting of paroxysmal nocturnal hemoglobinuria (PNH), atypical hemolytic uremic syndrome (aHUS), asthma, rheumatoid arthritis (RA); antiphospholipid antibody syndrome; lupus nephritis; ischemia-reperfusion injury; typical or infectious hemolytic uremic syndrome (tHUS); dense deposit disease (DDD); neuromyelitis optica (NMO); multifocal motor neuropathy (MMN); multiple sclerosis (MS); macular degeneration (e.g., age-related macular degeneration (AMD)); hemolysis, elevated liver enzymes, and low platelets (HELLP) syndrome; thrombotic thrombocytopenic purpura (TTP); spontaneous fetal loss; Pauci-immune vasculitis; epidermolysis bullosa; recurrent fetal loss; pre-eclampsia, traumatic brain injury, myasthenia gravis, cold agglutinin disease, dermatomyositis bullous pemphigoid, Shiga toxin E. coli-related hemolytic uremic syndrome, C3 neuropathy, anti-neutrophil cytoplasmic antibody-associated vasculitis (e.g., granulomatosis with polyangiitis (previously known as Wegener granulomatosis), Churg-Strauss syndrome, and microscopic polyangiitis), humoral and vascular transplant rejection, graft dysfunction, myocardial infarction (e.g., tissue damage and ischemia in myocardial infarction), an allogenic transplant, sepsis (e.g., poor outcome in sepsis), Coronary artery disease, dermatomyositis, Graves' disease, atherosclerosis, Alzheimer's disease, systemic inflammatory response sepsis, septic shock, spinal cord injury, glomerulonephritis, Hashimoto's thyroiditis, type I diabetes, psoriasis, pemphigus, autoimmune hemolytic anemia (AIHA), ITP, Goodpasture syndrome, Degos disease, antiphospholipid syndrome (APS), catastrophic APS (CAPS), a cardiovascular disorder, myocarditis, a cerebrovascular disorder, a peripheral (e.g., musculoskeletal) vascular disorder, a renovascular disorder, a mesenteric/enteric vascular disorder, vasculitis, Henoch-Schonlein purpura nephritis, systemic lupus erythematosus-associated vasculitis, vasculitis associated with rheumatoid arthritis, immune complex vasculitis, Takayasu's disease, dilated cardiomyopathy, diabetic angiopathy, Kawasaki's disease (arteritis), venous gas embolus (VGE), and restenosis following stent placement, rotational atherectomy, and percutaneous transluminal coronary angioplasty (PTCA) (see, e.g., Holers (2008) Immunological Reviews 223:300-316; Holers and Thurman (2004) Molecular Immunology 41:147-152; US20070172483).

[0716] In one embodiment, the complement factor B-associate disease is selected from the group consisting of C3 glomerulopathy, systemic lupus erythematosus (SLE), e.g., Lupus Nephritis, IgA nephropathy, diabetic nephropathy, polycystic kidney disease, membranous nephropathy, age-related macular degeneration, atypical hemolytic uremic syndrome, thrombotic microangiopathy, myasthenia gravis, ischemia and reperfusion injury, paroxysmal nocturnal hemoglobinuria, and rheumatoid arthritis

[0717] In another embodiment, the complement factor B-associate disease is selected from the group consisting of C3 glomerulopathy, systemic lupus erythematosus (SLE), e.g., Lupus Nephritis, IgA nephropathy, diabetic nephropathy, and polycystic kidney disease.

[0718] An iRNA of the invention may be administered as a “free iRNA.” A free iRNA is administered in the absence of a pharmaceutical composition. The naked iRNA may be in a suitable buffer solution. The buffer solution may comprise acetate, citrate, prolamine, carbonate, or phosphate, or any combination thereof. In one embodiment, the buffer solution is phosphate buffered saline (PBS). The pH and osmolarity of the buffer solution containing the iRNA can be adjusted such that it is suitable for administering to a subject.

[0719] Alternatively, an iRNA of the invention may be administered as a pharmaceutical composition, such as a dsRNA liposomal formulation.

[0720] Subjects that would benefit from an inhibition of complement factor B gene expression are subjects susceptible to or diagnosed with a CFB-associated disorder, e.g., C3 glomerulopathy, systemic lupus erythematosus (SLE), e.g., Lupus Nephritis, IgA nephropathy, diabetic nephropathy, and polycystic kidney disease.

[0721] In an embodiment, the method includes administering a composition featured herein such that expression of the target complement component B gene is decreased, such as for about 1, 2, 3, 4, 5, 6, 1-6, 1-3, or 3-6 months per dose. In certain embodiments, the composition is administered once every 3-6 months.

[0722] In one embodiment, the iRNAs useful for the methods and compositions featured herein specifically target RNAs (primary or processed) of the target complement factor B gene. Compositions and methods for inhibiting the expression of these genes using iRNAs can be prepared and performed as described herein.

[0723] Administration of the iRNA according to the methods of the invention may result prevention or treatment of a complement factor B-associated disorder, e.g., C3 glomerulopathy, systemic lupus erythematosus (SLE), e.g., Lupus Nephritis, IgA nephropathy, diabetic nephropathy, and polycystic kidney disease.

[0724] Subjects can be administered a therapeutic amount of iRNA, such as about 0.01 mg/kg to about 200 mg/kg. Subjects can be administered a therapeutic amount of iRNA, such as about 5 mg to about 1000 mg as a fixed dose, regardless of body weight.

[0725] In some embodiment, the iRNA is administered subcutaneously, i.e., by subcutaneous injection. One or more injections may be used to deliver the desired dose of iRNA to a subject. The injections may be repeated over a period of time.

[0726] The administration may be repeated on a regular basis. In certain embodiments, after an initial treatment regimen, the treatments can be administered on a less frequent basis. A repeat-dose regimen may include administration of a therapeutic amount of iRNA on a regular basis, such as once per month to once a year. In certain embodiments, the iRNA is administered about once per month to about once every three months, or about once every three months to about once every six months.

[0727] The invention further provides methods and uses of an iRNA agent or a pharmaceutical composition thereof for treating a subject that would benefit from reduction or inhibition of CFB gene expression, e.g., a subject having a CFB-associated disease, in combination with other pharmaceuticals or other therapeutic methods, e.g., with known pharmaceuticals or known therapeutic methods, such as, for example, those which are currently employed for treating these disorders.

[0728] Accordingly, in some aspects of the invention, the methods which include either a single iRNA agent of the invention, further include administering to the subject one or more additional therapeutic agents. The iRNA agent and an additional therapeutic agent or treatment may be administered at the same time or in the same combination, e.g., parenterally, or the additional therapeutic agent can be administered as part of a separate composition or at separate times or by another method known in the art or described herein.

[0729] In one embodiment, an iRNA agent of the invention is administered in combination with an anti-complement component C5 antibody, or antigen-binding fragment thereof (e.g., eculizumab or ravulizumab-cwvz), an iRNA agent targeting complement component C5, an iRNA agent targeting complement component C3, or a C3 peptide inhibitor (e.g., compstatin). In one embodiment, the iRNA agent of the invention is administered to the patient, and then the additional therapeutic agent is administered to the patient (or vice versa). In another embodiment, the iRNA agent of the invention and the additional therapeutic agent are administered at the same time.

[0730] The iRNA agent of the invention and an additional therapeutic agent or treatment may be administered at the same time or in the same combination, e.g., parenterally, or the additional therapeutic agent can be administered as part of a separate composition or at separate times or by another method known in the art or described herein.

### VIII. Kits

[0731] In certain aspects, the instant disclosure provides kits that include a suitable container containing a pharmaceutical formulation of a siRNA compound, e.g., a double-stranded siRNA compound, or ssiRNA compound, (e.g., a precursor, e.g., a larger siRNA compound which can be processed into a ssiRNA compound, or a DNA which encodes an siRNA compound, e.g., a double-stranded siRNA compound, or ssiRNA compound, or precursor thereof).

[0732] Such kits include one or more dsRNA agent(s) and instructions for use, e.g., instructions for administering a prophylactically or therapeutically effective amount of a dsRNA agent(s). The dsRNA agent may be in a vial or a pre-filled syringe. The kits may optionally further comprise means for administering the dsRNA agent (e.g., an injection device, such as a pre-filled syringe), or means for measuring the inhibition of CFB (e.g., means for measuring the inhibition of CFB mRNA, CFB protein, or CFB activity). Such means for measuring the inhibition of CFB may comprise a means for obtaining a sample from a subject, such as, e.g., a plasma sample. The kits of the invention may optionally further comprise means for determining the therapeutically effective or prophylactically effective amount.

[0733] In certain embodiments the individual components of the pharmaceutical formulation may be provided in one container, e.g., a vial or a pre-filled syringe. Alternatively, it may be desirable to provide the components of the pharmaceutical formulation separately in two or more containers, e.g., one container for a siRNA compound preparation, and at least another for a carrier compound. The kit may be packaged in a number of different configurations such as one or more containers in a single box. The different components can be combined, e.g., according to instructions provided with the kit. The components can be combined according to a method described herein, e.g., to prepare and administer a pharmaceutical composition. The kit can also include a delivery device.

[0734] This invention is further illustrated by the following examples which should not be construed as limiting. The entire contents of all publications, patents and published patent applications cited throughout this application, as well as the informal Sequence Listing and Figures, are hereby incorporated herein by reference.

### EXAMPLES

### Example 1. iRNA Synthesis

### Source of Reagents

[0735] Where the source of a reagent is not specifically given herein, such reagent can be obtained from any supplier of reagents for molecular biology at a quality/purity standard for application in molecular biology.

siRNA Design

[0736] siRNAs targeting the human complement factor B (CFB) gene, (human: NCBI refseqID NM_001710.5; NCBI GeneID: 629) was designed using custom R and Python scripts. The human NM_001710 REFSEQ mRNA, version 5, has a length of 2646 bases. Detailed lists of the unmodified CFB sense and antisense strand nucleotide sequences are shown in Tables 2, 4, and 6. Detailed lists of the modified CFB sense and antisense strand nucleotide sequences are shown in Tables 3, 5, and 7.

[0737] It is to be understood that, throughout the application, a duplex name without a decimal is equivalent to a duplex name with a decimal which merely references the batch number of the duplex. For example, AD-959917 is equivalent to AD-959917.1.

siRNA Synthesis

[0738] siRNAs were synthesized and annealed using routine methods known in the art.

### Example 2. In Vitro Screening Methods

### Cell Culture and 384-Well Transfections

[0739] Hep3b cells (ATCC, Manassas, VA) were grown to near confluence at 37° C. in an atmosphere of 5% CO₂ in Eagle's Minimum Essential Medium (Gibco) supplemented with 10% FBS (ATCC) before being released from the plate by trypsinization. Primary mouse hepatocytes (PMH) were freshly isolated less than 1 hour prior to transfections and grown in primary hepatocyte media. For both Hep3B and PMH, transfection was carried out by adding 5 μl of Opti-MEM plus 0.1 μl of Lipofectamine RNAiMax per well (Invitrogen, Carlsbad CA. cat #13778-150) to 5 μl of each siRNA duplex to an individual well in a 384-well plate. The mixture was then incubated at room temperature for 15 minutes. Forty μl of Eagle's Minimum Essential Medium (ATCC Cat #30-2003) containing ˜5×10³ Hep3B cells or PMH were then added to the siRNA mixture. Cells were incubated for 24 hours prior to RNA purification. Single dose experiments were performed at 10 nM, 1 nM, and 0.1 nM.

Total RNA Isolation Using DYNABEADS mRNA Isolation Kit (Invitrogen™, Part #: 610-12)

[0740] RNA was isolated using an automated protocol on a BioTek-EL406 platform using DYNABEADs (Invitrogen, cat #61012). Briefly, 70 μl of Lysis/Binding Buffer and 10 μl of lysis buffer containing 3 μl of magnetic beads were added to the plate with cells. Plates were incubated on an electromagnetic shaker for 10 minutes at room temperature and then magnetic beads were captured and the supernatant was removed. Bead-bound RNA was then washed 2 times with 150 μl Wash Buffer A and once with Wash Buffer B. Beads were then washed with 150 μl Elution Buffer, re-captured and supernatant removed.

cDNA Synthesis Using ABI High Capacity cDNA Reverse Transcription Kit (Applied Biosystems, Foster City, CA, Cat #4368813)

[0741] A master mix of 1.2 μl 10× Buffer, 0.48 μl 25×dNTPs, 1.2 μl Random primers, 0.6 μl Reverse Transcriptase, 0.6 μl RNase inhibitor and 7.92 μl of H₂O per reaction were added per well. Plates were sealed, mixed, and then incubated on an electromagnetic shaker for 10 minutes at room temperature, followed by incubation at 37° C. for 2 hours.

### Real Time PCR

[0742] Two μl of cDNA were added to a master mix containing 0.5 μl of human GAPDH TaqMan Probe (4326317E), and 0.5 μl CFB human probe (Hs01071998_m1) and 5 μl Lightcycler 480 probe master mix (Roche Cat #04887301001) per well in a 384 well plates (Roche cat #04887301001). Real time PCR was done in a LightCycler480 Real Time PCR system (Roche). Each duplex was tested at least two times and data were normalized to cells transfected with a non-targeting control siRNA. To calculate relative fold change, real time data were analyzed using the ΔΔCt method and normalized to assays performed with cells transfected with a non-targeting control siRNA.

[0743] The results of the single dose screen of the dsRNA agents in Tables 2 are 3 in Hep3B cells are shown in Table 8. The results of the single dose screen of the dsRNA agents Tables 4 and 5 in Hep3B cells are shown in Table 9. The results of the single dose screen of the dsRNA agents Tables 4 and 5 in PMH cells are shown in Table 10. The results of the single dose screen of the dsRNA agents Tables 6 and 7 in PMH cells are shown in Table 11. The results of the single dose screen of the dsRNA agents Tables 6 and 7 in Hep3B cells are shown in Table 12.

### ELISA Assay

[0744] Human CFB protein levels were determined using a quantitative sandwich enzyme immunoassay (Human Complement Factor B AssayMax ELISA Kit—AssayPro). Briefly, samples were diluted 1:1000 and 50 μl of sample was added to a well of a microtiter plate. Samples were incubated for two hours and subsequently washed. Fifty μl of biotinylated anti-CFB antibody was added to each well and incubated 1 hour. Samples were then washed and 50 μl of streptavidin-peroxidase conjugate was added to each well and incubated for 30 minutes. Following another wash, 50 μl of peroxidase enzyme substrate per well was added and samples were incubated for 15 minutes after which 50 μl of Stop Solution per well was added. Samples were read at 450 nm immediately and the amount of human CFB protein was determined by comparing the reading to a standard curve (0-280 ng of human CFB protein).

TABLE 1
Abbreviations of nucleotide monomers used in nucleic acid sequence representation. It will
be understood that these monomers, when present in an oligonucleotide, are mutually linked by 5′-3′-
phosphodiester bonds; and it is understood that when the nucleotide contains a 2′-fluoro modification,
then the fluoro replaces the hydroxy at that position in the parent nucleotide (i.e., it is a 2′-deoxy-2′-
fluoronucleotide).

| Abbreviation | Nucleotide(s) |
|---|---|
| A | Adenosine-3′-phosphate |
| Ab | beta-L-adenosine-3′-phosphate |
| Abs | beta-L-adenosine-3′-phosphorothioate |
| Af | 2′-fluoroadenosine-3′-phosphate |
| Afs | 2′-fluoroadenosine-3′-phosphorothioate |
| As | adenosine-3′-phosphorothioate |
| C | cytidine-3′-phosphate |
| Cb | beta-L-cytidine-3′-phosphate |
| Cbs | beta-L-cytidine-3′-phosphorothioate |
| Cf | 2′-fluorocytidine-3′-phosphate |
| Cfs | 2′-fluorocytidine-3′-phosphorothioate |
| Cs | cytidine-3′-phosphorothioate |
| G | guanosine-3′-phosphate |
| Gb | beta-L-guanosine-3′-phosphate |
| Gbs | beta-L-guanosine-3′-phosphorothioate |
| Gf | 2′-fluoroguanosine-3′-phosphate |
| Gfs | 2′-fluoroguanosine-3′-phosphorothioate |
| Gs | guanosine-3′-phosphorothioate |
| T | 5′-methyluridine-3′-phosphate |
| Tf | 2′-fluoro-5-methyluridine-3′-phosphate |
| Tfs | 2′-fluoro-5-methyluridine-3′-phosphorothioate |
| Ts | 5-methyluridine-3′-phosphorothioate |
| U | Uridine-3′-phosphate |
| Uf | 2′-fluorouridine-3′-phosphate |
| Ufs | 2′-fluorouridine -3′-phosphorothioate |
| Us | uridine-3′-phosphorothioate |
| N | any nucleotide, modified or unmodified |
| a | 2′-O-methyladenosine-3′-phosphate |
| as | 2′-O-methyladenosine-3′-phosphorothioate |
| C | 2′-O-methylcytidine-3′-phosphate |
| CS | 2′-O-methylcytidine-3′-phosphorothioate |
| g | 2′-O-methylguanosine-3′-phosphate |
| gs | 2′-O-methylguanosine-3′-phosphorothioate |
| t | 2′-O-methyl-5-methyluridine-3′-phosphate |
| ts | 2′-O-methyl-5-methyluridine-3′-phosphorothioate |
| U | 2′-O-methyluridine-3′-phosphate |
| us | 2′-O-methyluridine-3′-phosphorothioate |
| S | phosphorothioate linkage |
| L10 | N-(cholesterylcarboxamidocaproyl)-4-hydroxyprolinol (Hyp-C6-Chol) |
| L96 | N-[tris(GalNAc-alkyl)-amidodecanoyl)]-4-hydroxyprolinol (Hyp-(GalNAc-alkyl)3) [chemical structure] |
| Y34 | 2-hydroxymethyl-tetrahydrofurane-4-methoxy-3-phosphate (abasic 2′-OMe |
| | furanose) |
| Y44 | inverted abasic DNA (2-hydroxymethyl-tetrahydrofurane-5-phosphate) |
| (Agn) | Adenosine-glycol nucleic acid (GNA) |
| (Cgn) | Cytidine-glycol nucleic acid (GNA) |
| (Ggn) | Guanosine-glycol nucleic acid (GNA) |
| (Tgn) | Thymidine-glycol nucleic acid (GNA) S-Isomer |
| P | Phosphate |
| VP | Vinyl-phosphonate |
| dA | 2′-deoxyadenosine-3′-phosphate |
| dAs | 2′-deoxyadenosine-3′-phosphorothioate |
| dC | 2′-deoxycytidine-3′-phosphate |
| dCs | 2′-deoxycytidine-3′-phosphorothioate |
| dG | 2′-deoxyguanosine-3′-phosphate |
| dGs | 2′-deoxyguanosine-3′-phosphorothioate |
| dT | 2′-deoxythymidine-3′-phosphate |
| dTs | 2′-deoxythymidine-3′-phosphorothioate |
| dU | 2′-deoxyuridine |
| dUs | 2′-deoxyuridine-3′-phosphorothioate |
| (C2p) | cytidine-2′-phosphate |
| (G2p) | guanosine-2′-phosphate |
| (U2p) | uridine-2′-phosphate |
| (A2p) | adenosine-2 -phosphate |
| (Chd) | 2′-O-hexadecyl-cytidine-3′-phosphate |
| (Ahd) | 2′-O-hexadecyl-adenosine-3′-phosphate |
| (Ghd) | 2′-O-hexadecyl-guanosine-3′-phosphate |
| (Uhd) | 2′-O-hexadecyl-uridine-3′-phosphate |

TABLE 2
Unmodified Sense and Antisense Strand Sequences of Complement
Factor B dsRNA Agents

| | | SEQ | Range | | SEQ | Range |
|---|---|---|---|---|---|---|
| Duplex | Sense Sequence | ID | (NM_ | Antiense Sequence | ID | (NM_ |
| Name | 5′ to 3′ | NO: | 001710.5) | 5′ to 3′ | NO: | 001710.5) |
| AD-557072.1 | CAAAAAGUGUCUAGUCAACUU | 19 | 1145-1165 | AAGUUGACUAGACACUUUUUGGC | 105 | 1143-1165 |
| AD-558097.1 | UAGUGGAUGUCUGCAAAAACU | 20 | 2440-2460 | AGUUUUTGCAGACAUCCACUACU | 106 | 2438-2460 |
| AD-557774.1 | GAAUUCCUGAAUUUUAUGACU | 21 | 1981-2001 | AGUCAUAAAAUUCAGGAAUUCCU | 107 | 1979-2001 |
| AD-557070.1 | GCCAAAAAGUGUCUAGUCAAU | 22 | 1143-1163 | AUUGACTAGACACUUUUUGGCUC | 108 | 1141-1163 |
| AD-558068.1 | UCACAAGAGAAGUCGUUUCAU | 23 | 2393-2413 | AUGAAACGACUUCUCUUGUGAAC | 109 | 2391-2413 |
| AD-557068.1 | GAGCCAAAAAGUGUCUAGUCU | 24 | 1141-1161 | AGACUAGACACUUUUUGGCUCCU | 110 | 1139-1161 |
| AD-556701.1 | CUACUACAAUGUGAGUGAUGU | 25 | 635-655 | ACAUCACUCACAUUGUAGUAGGG | 111 | 633-655 |
| AD-558076.1 | GAAGUCGUUUCAUUCAAGUUU | 26 | 2401-2421 | AAACUUGAAUGAAACGACUUCUC | 112 | 2399-2421 |
| AD-558065.1 | AGUUCACAAGAGAAGUCGUUU | 27 | 2390-2410 | AAACGACUUCUCUUGUGAACUAU | 113 | 2388-2410 |
| AD-557859.1 | CAACUCGAGCUUUGAGGCUUU | 28 | 2086-2106 | AAAGCCTCAAAGCUCGAGUUGUU | 114 | 2084-2106 |
| AD-558096.1 | GUAGUGGAUGUCUGCAAAAAU | 29 | 2439-2459 | AUUUUUGCAGACAUCCACUACUC | 115 | 2437-2459 |
| AD-557422.1 | GAGGAUUAUCUGGAUGUCUAU | 30 | 1536-1556 | AUAGACAUCCAGAUAAUCCUCCC | 116 | 1534-1556 |
| AD-556919.1 | AGACUCCUUCAUGUACGACAU | 31 | 935-955 | AUGUCGTACAUGAAGGAGUCUUG | 117 | 933-955 |
| AD-558069.1 | CACAAGAGAAGUCGUUUCAUU | 32 | 2394-2414 | AAUGAAACGACUUCUCUUGUGAA | 118 | 2392-2414 |
| AD-558063.1 | AUAGUUCACAAGAGAAGUCGU | 33 | 2388-2408 | ACGACUTCUCUUGUGAACUAUCA | 119 | 2386-2408 |
| AD-557069.1 | AGCCAAAAAGUGUCUAGUCAU | 34 | 1142-1162 | AUGACUAGACACUUUUUGGCUCC | 120 | 1140-1162 |
| AD-558225.1 | UGAAUUAAAACAGCUGCGACU | 35 | 2604-2624 | AGUCGCAGCUGUUUUAAUUCAAU | 121 | 2602-2624 |
| AD-557853.1 | AGGGAACAACUCGAGCUUUGU | 36 | 2080-2100 | ACAAAGCUCGAGUUGUUCCCUCG | 122 | 2078-2100 |
| AD-558012.1 | GACAAAGUCAAGGACAUCUCU | 37 | 2277-2297 | AGAGAUGUCCUUGACUUUGUCAU | 123 | 2275-2297 |
| AD-558061.1 | UGAUAGUUCACAAGAGAAGUU | 38 | 2386-2406 | AACUUCTCUUGUGAACUAUCAAG | 124 | 2384-2406 |
| AD-557079.1 | UGUCUAGUCAACUUAAUUGAU | 39 | 1152-1172 | AUCAAUTAAGUUGACUAGACACU | 125 | 1150-1172 |
| AD-558066.1 | GUUCACAAGAGAAGUCGUUUU | 40 | 2391-2411 | AAAACGACUUCUCUUGUGAACUA | 126 | 2389-2411 |
| AD-557353.1 | GACCCAAUUACUGUCAUUGAU | 41 | 1467-1487 | AUCAAUGACAGUAAUUGGGUCCC | 127 | 1465-1487 |
| AD-557782.1 | GAAUUUUAUGACUAUGACGUU | 42 | 1989-2009 | AACGUCAUAGUCAUAAAAUUCAG | 128 | 1987-2009 |
| AD-556390.1 | CUGGAGUUUCAGCUUGGACAU | 43 | 179-199 | AUGUCCAAGCUGAAACUCCAGAC | 129 | 177-199 |
| AD-557078.1 | GUGUCUAGUCAACUUAAUUGU | 44 | 1151-1171 | ACAAUUAAGUUGACUAGACACUU | 130 | 1149-1171 |
| AD-557475.1 | UUCCAAGAAAGACAAUGAGCU | 45 | 1607-1627 | AGCUCATUGUCUUUCUUGGAAGC | 131 | 1605-1627 |
| AD-556734.1 | CUGCUAUGACGGUUACACUCU | 46 | 668-688 | AGAGUGTAACCGUCAUAGCAGUG | 132 | 666-688 |
| AD-557084.1 | AGUCAACUUAAUUGAGAAGGU | 47 | 1157-1177 | ACCUUCTCAAUUAAGUUGACUAG | 133 | 1155-1177 |
| AD-557498.1 | AUGUGUUCAAAGUCAAGGAUU | 48 | 1630-1650 | AAUCCUTGACUUUGAACACAUGU | 134 | 1628-1650 |
| AD-556788.1 | GACAGCGAUCUGUGACAACGU | 49 | 740-760 | ACGUUGTCACAGAUCGCUGUCUG | 135 | 738-760 |
| AD-557067.1 | GGAGCCAAAAAGUGUCUAGUU | 50 | 1140-1160 | AACUAGACACUUUUUGGCUCCUG | 136 | 1138-1160 |
| AD-557852.1 | GAGGGAACAACUCGAGCUUUU | 51 | 2079-2099 | AAAAGCTCGAGUUGUUCCCUCGG | 137 | 2077-2099 |
| AD-556733.1 | ACUGCUAUGACGGUUACACUU | 52 | 667-687 | AAGUGUAACCGUCAUAGCAGUGG | 138 | 665-687 |
| AD-556725.1 | CUCUUUCCACUGCUAUGACGU | 53 | 659-679 | ACGUCATAGCAGUGGAAAGAGAU | 139 | 657-679 |
| AD-557860.1 | AACUCGAGCUUUGAGGCUUCU | 54 | 2087-2107 | AGAAGCCUCAAAGCUCGAGUUGU | 140 | 2085-2107 |
| AD-556786.1 | CAGACAGCGAUCUGUGACAAU | 55 | 738-758 | AUUGUCACAGAUCGCUGUCUGCC | 141 | 736-758 |
| AD-556581.1 | CCUUCUGGCUUCUACCCGUAU | 56 | 465-485 | AUACGGGUAGAAGCCAGAAGGAC | 142 | 463-485 |
| AD-556963.1 | ACCAUAGAAGGAGUCGAUGCU | 57 | 999-1019 | AGCAUCGACUCCUUCUAUGGUCU | 143 | 997-1019 |
| AD-557450.1 | ACCAAGUGAACAUCAAUGCUU | 58 | 1582-1602 | AAGCAUTGAUGUUCACUUGGUUC | 144 | 1580-1602 |
| AD-557204.1 | UGAAAUCAAUUAUGAAGACCU | 59 | 1298-1318 | AGGUCUTCAUAAUUGAUUUCAUU | 145 | 1296-1318 |
| AD-558062.1 | GAUAGUUCACAAGAGAAGUCU | 60 | 2387-2407 | AGACUUCUCUUGUGAACUAUCAA | 146 | 2385-2407 |
| AD-557602.1 | AAGGGUACCGAUUACCACAAU | 61 | 1734-1754 | AUUGUGGUAAUCGGUACCCUUCC | 147 | 1732-1754 |
| AD-556917.1 | CAAGACUCCUUCAUGUACGAU | 62 | 933-953 | AUCGUACAUGAAGGAGUCUUGGC | 148 | 931-953 |
| AD-557969.1 | CUGACUCGGAAGGAGGUCUAU | 63 | 2196-2216 | AUAGACCUCCUUCCGAGUCAGCU | 149 | 2194-2216 |
| AD-558064.1 | UAGUUCACAAGAGAAGUCGUU | 64 | 2389-2409 | AACGACTUCUCUUGUGAACUAUC | 150 | 2387-2409 |
| AD-558105.1 | GUCUGCAAAAACCAGAAGCGU | 65 | 2448-2468 | ACGCUUCUGGUUUUUGCAGACAU | 151 | 2446-2468 |
| AD-556791.1 | AGCGAUCUGUGACAACGGAGU | 66 | 743-763 | ACUCCGTUGUCACAGAUCGCUGU | 152 | 741-763 |
| AD-557972.1 | ACUCGGAAGGAGGUCUACAUU | 67 | 2199-2219 | AAUGUAGACCUCCUUCCGAGUCA | 153 | 2197-2219 |
| AD-556920.1 | GACUCCUUCAUGUACGACACU | 68 | 936-956 | AGUGUCGUACAUGAAGGAGUCUU | 154 | 934-956 |
| AD-558078.1 | AGUCGUUUCAUUCAAGUUGGU | 69 | 2403-2423 | ACCAACTUGAAUGAAACGACUUC | 155 | 2401-2423 |
| AD-557861.1 | ACUCGAGCUUUGAGGCUUCCU | 70 | 2088-2108 | AGGAAGCCUCAAAGCUCGAGUUG | 156 | 2086-2108 |
| AD-557856.1 | GAACAACUCGAGCUUUGAGGU | 71 | 2083-2103 | ACCUCAAAGCUCGAGUUGUUCCC | 157 | 2081-2103 |
| AD-557041.1 | UGGUGCUAGAUGGAUCAGACU | 72 | 1096-1116 | AGUCUGAUCCAUCUAGCACCAGG | 158 | 1094-1116 |
| AD-556874.1 | GUGUCAGGAAGGUGGCUCUUU | 73 | 890-910 | AAAGAGCCACCUUCCUGACACGU | 159 | 888-910 |
| AD-557345.1 | CUGAUGGAUUGCACAACAUGU | 74 | 1441-1461 | ACAUGUTGUGCAAUCCAUCAGUC | 160 | 1439-1461 |
| AD-557839.1 | CAGACUAUCAGGCCCAUUUGU | 75 | 2046-2066 | ACAAAUGGGCCUGAUAGUCUGGC | 161 | 2044-2066 |
| AD-556962.1 | GACCAUAGAAGGAGUCGAUGU | 76 | 998-1018 | ACAUCGACUCCUUCUAUGGUCUC | 162 | 996-1018 |
| AD-557066.1 | AGGAGCCAAAAAGUGUCUAGU | 77 | 1139-1159 | ACUAGACACUUUUUGGCUCCUGU | 163 | 1137-1159 |
| AD-556961.1 | AGACCAUAGAAGGAGUCGAUU | 78 | 997-1017 | AAUCGACUCCUUCUAUGGUCUCU | 164 | 995-1017 |
| AD-557226.1 | AAGUUGAAGUCAGGGACUAAU | 79 | 1320-1340 | AUUAGUCCCUGACUUCAACUUGU | 165 | 1318-1340 |
| AD-557865.1 | GAGCUUUGAGGCUUCCUCCAU | 80 | 2092-2112 | AUGGAGGAAGCCUCAAAGCUCGA | 166 | 2090-2112 |
| AD-557209.1 | UCAAUUAUGAAGACCACAAGU | 81 | 1303-1323 | ACUUGUGGUCUUCAUAAUUGAUU | 167 | 1301-1323 |
| AD-556918.1 | AAGACUCCUUCAUGUACGACU | 82 | 934-954 | AGUCGUACAUGAAGGAGUCUUGG | 168 | 932-954 |
| AD-557868.1 | CUUUGAGGCUUCCUCCAACUU | 83 | 2095-2115 | AAGUUGGAGGAAGCCUCAAAGCU | 169 | 2093-2115 |
| AD-557873.1 | AGGCUUCCUCCAACUACCACU | 84 | 2100-2120 | AGUGGUAGUUGGAGGAAGCCUCA | 170 | 2098-2120 |
| AD-556787.1 | AGACAGCGAUCUGUGACAACU | 85 | 739-759 | AGUUGUCACAGAUCGCUGUCUGC | 171 | 737-759 |
| AD-558004.1 | CAGGCUAUGACAAAGUCAAGU | 86 | 2269-2289 | ACUUGACUUUGUCAUAGCCUGGG | 172 | 2267-2289 |
| AD-557867.1 | GCUUUGAGGCUUCCUCCAACU | 87 | 2094-2114 | AGUUGGAGGAAGCCUCAAAGCUC | 173 | 2092-2114 |
| AD-557788.1 | UAUGACUAUGACGUUGCCCUU | 88 | 1995-2015 | AAGGGCAACGUCAUAGUCAUAAA | 174 | 1993-2015 |
| AD-558106.1 | UCUGCAAAAACCAGAAGCGGU | 89 | 2449-2469 | ACCGCUTCUGGUUUUUGCAGACA | 175 | 2447-2469 |
| AD-556724.1 | UCUCUUUCCACUGCUAUGACU | 90 | 658-678 | AGUCAUAGCAGUGGAAAGAGAUC | 176 | 656-678 |
| AD-556739.1 | AUGACGGUUACACUCUCCGGU | 91 | 673-693 | ACCGGAGAGUGUAACCGUCAUAG | 177 | 671-693 |
| AD-557417.1 | CAAGGGAGGAUUAUCUGGAUU | 92 | 1531-1551 | AAUCCAGAUAAUCCUCCCUUGGG | 178 | 1529-1551 |
| AD-556790.1 | CAGCGAUCUGUGACAACGGAU | 93 | 742-762 | AUCCGUTGUCACAGAUCGCUGUC | 179 | 740-762 |
| AD-557872.1 | GAGGCUUCCUCCAACUACCAU | 94 | 2099-2119 | AUGGUAGUUGGAGGAAGCCUCAA | 180 | 2097-2119 |
| AD-556738.1 | UAUGACGGUUACACUCUCCGU | 95 | 672-692 | ACGGAGAGUGUAACCGUCAUAGC | 181 | 670-692 |
| AD-557857.1 | AACAACUCGAGCUUUGAGGCU | 96 | 2084-2104 | AGCCUCAAAGCUCGAGUUGUUCC | 182 | 2082-2104 |
| AD-556726.1 | UCUUUCCACUGCUAUGACGGU | 97 | 660-680 | ACCGUCAUAGCAGUGGAAAGAGA | 183 | 658-680 |
| AD-557495.1 | AACAUGUGUUCAAAGUCAAGU | 98 | 1627-1647 | ACUUGACUUUGAACACAUGUUGC | 184 | 1625-1647 |
| AD-557016.1 | CCUUCAGGCUCCAUGAACAUU | 99 | 1071-1091 | AAUGUUCAUGGAGCCUGAAGGGU | 185 | 1069-1091 |
| AD-558074.1 | GAGAAGUCGUUUCAUUCAAGU | 100 | 2399-2419 | ACUUGAAUGAAACGACUUCUCUU | 186 | 2397-2419 |
| AD-557604.1 | GGGUACCGAUUACCACAAGCU | 101 | 1736-1756 | AGCUUGTGGUAAUCGGUACCCUU | 187 | 1734-1756 |
| AD-557346.1 | UGAUGGAUUGCACAACAUGGU | 102 | 1442-1462 | ACCAUGTUGUGCAAUCCAUCAGU | 188 | 1440-1462 |
| AD-557851.1 | CGAGGGAACAACUCGAGCUUU | 103 | 2078-2098 | AAAGCUCGAGUUGUUCCCUCGGU | 189 | 2076-2098 |
| AD-557786.1 | UUUAUGACUAUGACGUUGCCU | 104 | 1993-2013 | AGGCAACGUCAUAGUCAUAAAAU | 190 | 1991-2013 |

TABLE 3
Modified Sense and Antisense Strand Sequences of Complement Factor B dsRNA Agents

| | | SEQ | | SEQ | | SEQ |
|---|---|---|---|---|---|---|
| | | ID | Antisense | ID | | ID |
| Duplex Name | Sense Sequence 5′ to 3′ | NO: | Sequence 5′ to 3′ | NO: | mRNA Target Sequence | NO: |
| AD-557072.1 | csasaaaaGfuGfUfCfuagucaacuuL96 | 191 | asAfsguug(Agn)cua | 277 | GCCAAAAAGUGUCUAGUCAACUU | 363 |
| | | | gacAfcUfuuuugsgsc | | | |
| AD-558097.1 | usasguggAfuGfUfCfugcaaaaacuL96 | 192 | asGfsuuuu(Tgn)gca | 278 | AGUAGUGGAUGUCUGCAAAAACC | 364 |
| | | | gacAfuCfcacuascsu | | | |
| AD-557774.1 | gsasauucCfuGfAfAfuuuuaugacuL96 | 193 | asGfsucau(Agn)aaa | 279 | AGGAAUUCCUGAAUUUUAUGACU | 365 |
| | | | uucAfgGfaauucscsu | | | |
| AD-557070.1 | gscscaaaAfaGfUfGfucuagucaauL96 | 194 | asUfsugac(Tgn)aga | 280 | GAGCCAAAAAGUGUCUAGUCAAC | 366 |
| | | | cacUfuUfuuggcsusc | | | |
| AD-558068.1 | uscsacaaGfaGfAfAfgucguuucauL96 | 195 | asUfsgaaa(Cgn)gac | 281 | GUUCACAAGAGAAGUCGUUUCAU | 367 |
| | | | uucUfcUfugugasasc | | | |
| AD-557068.1 | gsasgccaAfaAfAfGfugucuagucuL96 | 196 | asGfsacua(Ggn)aca | 282 | AGGAGCCAAAAAGUGUCUAGUCA | 368 |
| | | | cuuUfuUfggcucscsu | | | |
| AD-556701.1 | csusacuaCfaAfUfGfugagugauguL96 | 197 | asCfsauca(Cgn)uca | 283 | CCCUACUACAAUGUGAGUGAUGA | 369 |
| | | | cauUfgUfaguagsgsg | | | |
| AD-558076.1 | gsasagucGfuUfUfCfauucaaguuuL96 | 198 | asAfsacuu(Ggn)aau | 284 | GAGAAGUCGUUUCAUUCAAGUUG | 370 |
| | | | gaaAfcGfacuucsusc | | | |
| AD-557859.1 | csasacucGfaGfCfUfuugaggcuuuL96 | 200 | asAfsagcc(Tgn)caa | 286 | AACAACUCGAGCUUUGAGGCUUC | 372 |
| | | | agcUfcGfaguugsusu | | | |
| AD-558096.1 | gsusagugGfaUfGfUfcugcaaaaauL96 | 201 | asUfsuuuu(Ggn)cag | 287 | GAGUAGUGGAUGUCUGCAAAAAC | 373 |
| | | | acaUfcCfacuacsusc | | | |
| AD-557422.1 | gsasggauUfaUfCfUfggaugucuauL96 | 202 | asUfsagac(Agn)ucc | 288 | GGGAGGAUUAUCUGGAUGUCUAU | 374 |
| | | | agaUfaAfuccucscsc | | | |
| AD-556919.1 | asgsacucCfuUfCfAfuguacgacauL96 | 203 | asUfsgucg(Tgn)aca | 289 | CAAGACUCCUUCAUGUACGACAC | 375 |
| | | | ugaAfgGfagucususg | | | |
| AD-558069.1 | csascaagAfgAfAfGfucguuucauuL96 | 204 | asAfsugaa(Agn)cga | 290 | UUCACAAGAGAAGUCGUUUCAUU | 376 |
| | | | cuuCfuCfuugugsasa | | | |
| AD-558063.1 | asusaguuCfaCfAfAfgagaagucguL96 | 205 | asCfsgacu(Tgn)cuc | 291 | UGAUAGUUCACAAGAGAAGUCGU | 377 |
| | | | uugUfgAfacuauscsa | | | |
| AD-557069.1 | asgsccaaAfaAfGfUfgucuagucauL96 | 206 | asUfsgacu(Agn)gac | 292 | GGAGCCAAAAAGUGUCUAGUCAA | 378 |
| | | | acuUfuUfuggcuscsc | | | |
| AD-558225.1 | usgsaauuAfaAfAfCfagcugcgacuL96 | 207 | asGfsucgc(Agn)gcu | 293 | AUUGAAUUAAAACAGCUGCGACA | 379 |
| | | | guuUfuAfauucasasu | | | |
| AD-557853.1 | asgsggaaCfaAfCfUfcgagcuuuguL96 | 208 | asCfsaaag(Cgn)ucg | 294 | CGAGGGAACAACUCGAGCUUUGA | 380 |
| | | | aguUfgUfucccuscsg | | | |
| AD-558012.1 | gsascaaaGfuCfAfAfggacaucucuL96 | 209 | asGfsagau(Ggn)ucc | 295 | AUGACAAAGUCAAGGACAUCUCA | 381 |
| | | | uugAfcUfuugucsasu | | | |
| AD-558061.1 | usgsauagUfuCfAfCfaagagaaguuL96 | 210 | asAfscuuc(Tgn)cuu | 296 | CUUGAUAGUUCACAAGAGAAGUC | 382 |
| | | | gugAfaCfuaucasasg | | | |
| AD-557079.1 | usgsucuaGfuCfAfAfcuuaauugauL96 | 211 | asUfscaau(Tgn)aag | 297 | AGUGUCUAGUCAACUUAAUUGAG | 383 |
| | | | uugAfcUfagacascsu | | | |
| AD-558066.1 | gsusucacAfaGfAfGfaagucguuuuL96 | 212 | asAfsaacg(Agn)cuu | 298 | UAGUUCACAAGAGAAGUCGUUUC | 384 |
| | | | cucUfuGfugaacsusa | | | |
| AD-557353.1 | gsascccaAfuUfAfCfugucauugauL96 | 213 | asUfscaau(Ggn)aca | 299 | GGGACCCAAUUACUGUCAUUGAU | 385 |
| | | | guaAfuUfgggucscsc | | | |
| AD-557782.1 | gsasauuuUfaUfGfAfcuaugacguuL96 | 214 | asAfscguc(Agn)uag | 300 | CUGAAUUUUAUGACUAUGACGUU | 386 |
| | | | ucaUfaAfaauucsasg | | | |
| AD-556390.1 | csusggagUfuUfCfAfgcuuggacauL96 | 215 | asUfsgucc(Agn)agc | 301 | GUCUGGAGUUUCAGCUUGGACAC | 387 |
| | | | ugaAfaCfuccagsasc | | | |
| AD-557078.1 | gsusgucuAfgUfCfAfacuuaauuguL96 | 216 | asCfsaauu(Agn)agu | 302 | AAGUGUCUAGUCAACUUAAUUGA | 388 |
| | | | ugaCfuAfgacacsusu | | | |
| AD-557475.1 | ususccaaGfaAfAfGfacaaugagcuL96 | 217 | asGfscuca(Tgn)ugu | 303 | GCUUCCAAGAAAGACAAUGAGCA | 389 |
| | | | cuuUfcUfuggaasgsc | | | |
| AD-556734.1 | csusgcuaUfgAfCfGfguuacacucuL96 | 218 | asGfsagug(Tgn)aac | 304 | CACUGCUAUGACGGUUACACUCU | 390 |
| | | | cguCfaUfagcagsusg | | | |
| AD-557084.1 | asgsucaaCfuUfAfAfuugagaagguL96 | 219 | asCfscuuc(Tgn)caa | 305 | CUAGUCAACUUAAUUGAGAAGGU | 391 |
| | | | uuaAfgUfugacusasg | | | |
| AD-557498.1 | asusguguUfcAfAfAfgucaaggauuL96 | 220 | asAfsuccu(Tgn)gac | 306 | ACAUGUGUUCAAAGUCAAGGAUA | 392 |
| | | | uuuGfaAfcacausgsu | | | |
| AD-556788.1 | gsascagcGfaUfCfUfgugacaacguL96 | 221 | asCfsguug(Tgn)cac | 307 | CAGACAGCGAUCUGUGACAACGG | 393 |
| | | | agaUfcGfcugucsusg | | | |
| AD-557067.1 | gsgsagccAfaAfAfAfgugucuaguuL96 | 222 | asAfscuag(Agn)cac | 308 | CAGGAGCCAAAAAGUGUCUAGUC | 394 |
| | | | uuuUfuGfgcuccsusg | | | |
| AD-557852.1 | gsasgggaAfcAfAfCfucgagcuuuuL96 | 223 | asAfsaagc(Tgn)cga | 309 | CCGAGGGAACAACUCGAGCUUUG | 395 |
| | | | guuGfuUfcccucsgsg | | | |
| AD-556733.1 | ascsugcuAfuGfAfCfgguuacacuuL96 | 224 | asAfsgugu(Agn)acc | 310 | CCACUGCUAUGACGGUUACACUC | 396 |
| | | | gucAfuAfgcagusgsg | | | |
| AD-556725.1 | csuscuuuCfcAfCfUfgcuaugacguL96 | 225 | asCfsguca(Tgn)agc | 311 | AUCUCUUUCCACUGCUAUGACGG | 397 |
| | | | aguGfgAfaagagsasu | | | |
| AD-557860.1 | asascucgAfgCfUfUfugaggcuucuL96 | 226 | asGfsaagc(Cgn)uca | 312 | ACAACUCGAGCUUUGAGGCUUCC | 398 |
| | | | aagCfuCfgaguusgsu | | | |
| AD-556786.1 | csasgacaGfcGfAfUfcugugacaauL96 | 227 | asUfsuguc(Agn)cag | 313 | GGCAGACAGCGAUCUGUGACAAC | 399 |
| | | | aucGfcUfgucugscsc | | | |
| AD-556581.1 | cscsuucuGfgCfUfUfcuacccguauL96 | 228 | asUfsacgg(Ggn)uag | 314 | GUCCUUCUGGCUUCUACCCGUAC | 400 |
| | | | aagCfcAfgaaggsasc | | | |
| AD-556963.1 | ascscauaGfaAfGfGfagucgaugcuL96 | 229 | asGfscauc(Ggn)acu | 315 | AGACCAUAGAAGGAGUCGAUGCU | 401 |
| | | | ccuUfcUfaugguscsu | | | |
| AD-557450.1 | ascscaagUfgAfAfCfaucaaugcuuL96 | 230 | asAfsgcau(Tgn)gau | 316 | GAACCAAGUGAACAUCAAUGCUU | 402 |
| | | | guuCfaCfuuggususc | | | |
| AD-557204.1 | usgsaaauCfaAfUfUfaugaagaccuL96 | 231 | asGfsgucu(Tgn)cau | 317 | AAUGAAAUCAAUUAUGAAGACCA | 403 |
| | | | aauUfgAfuuucasusu | | | |
| AD-558062.1 | gsasuaguUfcAfCfAfagagaagucuL96 | 232 | asGfsacuu(Cgn)ucu | 318 | UUGAUAGUUCACAAGAGAAGUCG | 404 |
| | | | uguGfaAfcuaucsasa | | | |
| AD-557602.1 | asasggguAfcCfGfAfuuaccacaauL96 | 233 | asUfsugug(Ggn)uaa | 319 | GGAAGGGUACCGAUUACCACAAG | 405 |
| | | | ucgGfuAfcccuuscsc | | | |
| AD-556917.1 | csasagacUfcCfUfUfcauguacgauL96 | 234 | asUfscgua(Cgn)aug | 320 | GCCAAGACUCCUUCAUGUACGAC | 406 |
| | | | aagGfaGfucuugsgsc | | | |
| AD-557969.1 | csusgacuCfgGfAfAfggaggucuauL96 | 235 | asUfsagac(Cgn)ucc | 321 | AGCUGACUCGGAAGGAGGUCUAC | 407 |
| | | | uucCfgAfgucagscsu | | | |
| AD-558064.1 | usasguucAfcAfAfGfagaagucguuL96 | 236 | asAfscgac(Tgn)ucu | 322 | GAUAGUUCACAAGAGAAGUCGUU | 408 |
| | | | cuuGfuGfaacuasusc | | | |
| AD-558105.1 | gsuscugcAfaAfAfAfccagaagcguL96 | 237 | asCfsgcuu(Cgn)ugg | 323 | AUGUCUGCAAAAACCAGAAGCGG | 409 |
| | | | uuuUfuGfcagacsasu | | | |
| AD-556791.1 | asgscgauCfuGfUfGfacaacggaguL96 | 238 | asCfsuccg(Tgn)ugu | 324 | ACAGCGAUCUGUGACAACGGAGC | 410 |
| | | | cacAfgAfucgcusgsu | | | |
| AD-557972.1 | ascsucggAfaGfGfAfggucuacauuL96 | 239 | asAfsugua(Ggn)acc | 325 | UGACUCGGAAGGAGGUCUACAUC | 411 |
| | | | uccUfuCfcgaguscsa | | | |
| AD-556920.1 | gsascuccUfuCfAfUfguacgacacuL96 | 240 | asGfsuguc(Ggn)uac | 326 | AAGACUCCUUCAUGUACGACACC | 412 |
| | | | augAfaGfgagucsusu | | | |
| AD-558078.1 | asgsucguUfuCfAfUfucaaguugguL96 | 241 | asCfscaac(Tgn)uga | 327 | GAAGUCGUUUCAUUCAAGUUGGU | 413 |
| | | | augAfaAfcgacususc | | | |
| AD-557861.1 | ascsucgaGfcUfUfUfgaggcuuccuL96 | 242 | asGfsgaag(Cgn)cuc | 328 | CAACUCGAGCUUUGAGGCUUCCU | 414 |
| | | | aaaGfcUfcgagususg | | | |
| AD-557856.1 | gsasacaaCfuCfGfAfgcuuugagguL96 | 243 | asCfscuca(Agn)agc | 329 | GGGAACAACUCGAGCUUUGAGGC | 415 |
| | | | ucgAfgUfuguucscsc | | | |
| AD-557041.1 | usgsgugcUfaGfAfUfggaucagacuL96 | 244 | asGfsucug(Agn)ucc | 330 | CCUGGUGCUAGAUGGAUCAGACA | 416 |
| | | | aucUfaGfcaccasgsg | | | |
| AD-556874.1 | gsusgucaGfgAfAfGfguggcucuuuL96 | 245 | asAfsagag(Cgn)cac | 331 | ACGUGUCAGGAAGGUGGCUCUUG | 417 |
| | | | cuuCfcUfgacacsgsu | | | |
| AD-557345.1 | csusgaugGfaUfUfGfcacaacauguL96 | 246 | asCfsaugu(Tgn)gug | 332 | GACUGAUGGAUUGCACAACAUGG | 418 |
| | | | caaUfcCfaucagsusc | | | |
| AD-557839.1 | csasgacuAfuCfAfGfgcccauuuguL96 | 247 | asCfsaaau(Ggn)ggc | 333 | GCCAGACUAUCAGGCCCAUUUGU | 419 |
| | | | cugAfuAfgucugsgsc | | | |
| AD-556962.1 | gsasccauAfgAfAfGfgagucgauguL96 | 248 | asCfsaucg(Agn)cuc | 334 | GAGACCAUAGAAGGAGUCGAUGC | 420 |
| | | | cuuCfuAfuggucsusc | | | |
| AD-557066.1 | asgsgagcCfaAfAfAfagugucuaguL96 | 249 | asCfsuaga(Cgn)acu | 335 | ACAGGAGCCAAAAAGUGUCUAGU | 421 |
| | | | uuuUfgGfcuccusgsu | | | |
| AD-556961.1 | asgsaccaUfaGfAfAfggagucgauuL96 | 250 | asAfsucga(Cgn)ucc | 336 | AGAGACCAUAGAAGGAGUCGAUG | 422 |
| | | | uucUfaUfggucuscsu | | | |
| AD-557226.1 | asasguugAfaGfUfCfagggacuaauL96 | 251 | asUfsuagu(Cgn)ccu | 337 | ACAAGUUGAAGUCAGGGACUAAC | 423 |
| | | | gacUfuCfaacuusgsu | | | |
| AD-557865.1 | gsasgcuuUfgAfGfGfcuuccuccauL96 | 252 | asUfsggag(Ggn)aag | 338 | UCGAGCUUUGAGGCUUCCUCCAA | 424 |
| | | | ccuCfaAfagcucsgsa | | | |
| AD-557209.1 | uscsaauuAfuGfAfAfgaccacaaguL96 | 253 | asCfsuugu(Ggn)guc | 339 | AAUCAAUUAUGAAGACCACAAGU | 425 |
| | | | uucAfuAfauugasusu | | | |
| AD-556918.1 | asasgacuCfcUfUfCfauguacgacuL96 | 254 | asGfsucgu(Agn)cau | 340 | CCAAGACUCCUUCAUGUACGACA | 426 |
| | | | gaaGfgAfgucuusgsg | | | |
| AD-557868.1 | csusuugaGfgCfUfUfccuccaacuuL96 | 255 | asAfsguug(Ggn)agg | 341 | AGCUUUGAGGCUUCCUCCAACUA | 427 |
| | | | aagCfcUfcaaagscsu | | | |
| AD-557873.1 | asgsgcuuCfcUfCfCfaacuaccacuL96 | 256 | asGfsuggu(Agn)guu | 342 | UGAGGCUUCCUCCAACUACCACU | 428 |
| | | | ggaGfgAfagccuscsa | | | |
| AD-556787.1 | asgsacagCfgAfUfCfugugacaacuL96 | 257 | asGfsuugu(Cgn)aca | 343 | GCAGACAGCGAUCUGUGACAACG | 429 |
| | | | gauCfgCfugucusgsc | | | |
| AD-558004.1 | csasggcuAfuGfAfCfaaagucaaguL96 | 258 | asCfsuuga(Cgn)uuu | 344 | CCCAGGCUAUGACAAAGUCAAGG | 430 |
| | | | gucAfuAfgccugsgsg | | | |
| AD-557867.1 | gscsuuugAfgGfCfUfuccuccaacuL96 | 259 | asGfsuugg(Agn)gga | 345 | GAGCUUUGAGGCUUCCUCCAACU | 431 |
| | | | agcCfuCfaaagcsusc | | | |
| AD-557788.1 | usasugacUfaUfGfAfcguugcccuuL96 | 260 | asAfsgggc(Agn)acg | 346 | UUUAUGACUAUGACGUUGCCCUG | 432 |
| | | | ucaUfaGfucauasasa | | | |
| AD-558106.1 | uscsugcaAfaAfAfCfcagaagcgguL96 | 261 | asCfscgcu(Tgn)cug | 347 | UGUCUGCAAAAACCAGAAGCGGC | 433 |
| | | | guuUfuUfgcagascsa | | | |
| AD-556724.1 | uscsucuuUfcCfAfCfugcuaugacuL96 | 262 | asGfsucau(Agn)gca | 348 | GAUCUCUUUCCACUGCUAUGACG | 434 |
| | | | gugGfaAfagagasusc | | | |
| AD-556739.1 | asusgacgGfuUfAfCfacucuccgguL96 | 263 | asCfscgga(Ggn)agu | 349 | CUAUGACGGUUACACUCUCCGGG | 435 |
| | | | guaAfcCfgucausasg | | | |
| AD-557417.1 | csasagggAfgGfAfUfuaucuggauuL96 | 264 | asAfsucca(Ggn)aua | 350 | CCCAAGGGAGGAUUAUCUGGAUG | 436 |
| | | | aucCfuCfccuugsgsg | | | |
| AD-556790.1 | csasgcgaUfcUfGfUfgacaacggauL96 | 265 | asUfsccgu(Tgn)guc | 351 | GACAGCGAUCUGUGACAACGGAG | 437 |
| | | | acaGfaUfcgcugsusc | | | |
| AD-557872.1 | gsasggcuUfcCfUfCfcaacuaccauL96 | 266 | asUfsggua(Ggn)uug | 352 | UUGAGGCUUCCUCCAACUACCAC | 438 |
| | | | gagGfaAfgccucsasa | | | |
| AD-556738.1 | usasugacGfgUfUfAfcacucuccguL96 | 267 | asCfsggag(Agn)gug | 353 | GCUAUGACGGUUACACUCUCCGG | 439 |
| | | | uaaCfcGfucauasgsc | | | |
| AD-557857.1 | asascaacUfcGfAfGfcuuugaggcuL96 | 268 | asGfsccuc(Agn)aag | 354 | GGAACAACUCGAGCUUUGAGGCU | 440 |
| | | | cucGfaGfuuguuscsc | | | |
| AD-556726.1 | uscsuuucCfaCfUfGfcuaugacgguL96 | 269 | asCfscguc(Agn)uag | 355 | UCUCUUUCCACUGCUAUGACGGU | 441 |
| | | | cagUfgGfaaagasgsa | | | |
| AD-557495.1 | asascaugUfgUfUfCfaaagucaaguL96 | 270 | asCfsuuga(Cgn)uuu | 356 | GCAACAUGUGUUCAAAGUCAAGG | 442 |
| | | | gaaCfaCfauguusgsc | | | |
| AD-557016.1 | cscsuucaGfgCfUfCfcaugaacauuL96 | 271 | asAfsuguu(Cgn)aug | 357 | ACCCUUCAGGCUCCAUGAACAUC | 443 |
| | | | gagCfcUfgaaggsgsu | | | |
| AD-558074.1 | gsasgaagUfcGfUfUfucauucaaguL96 | 272 | asCfsuuga(Agn)uga | 358 | AAGAGAAGUCGUUUCAUUCAAGU | 444 |
| | | | aacGfaCfuucucsusu | | | |
| AD-557604.1 | gsgsguacCfgAfUfUfaccacaagcuL96 | 273 | asGfscuug(Tgn)ggu | 359 | AAGGGUACCGAUUACCACAAGCA | 445 |
| | | | aauCfgGfuacccsusu | | | |
| AD-557346.1 | usgsauggAfuUfGfCfacaacaugguL96 | 274 | asCfscaug(Tgn)ugu | 360 | ACUGAUGGAUUGCACAACAUGGG | 446 |
| | | | gcaAfuCfcaucasgsu | | | |
| AD-557851.1 | csgsagggAfaCfAfAfcucgagcuuuL96 | 275 | asAfsagcu(Cgn)gag | 361 | ACCGAGGGAACAACUCGAGCUUU | 447 |
| | | | uugUfuCfccucgsgsu | | | |

TABLE 4
Unmodified Sense and Antisense Sequences of Complement Factor B dsRNA Agents

| | | SEQ | | | SEQ | |
|---|---|---|---|---|---|---|
| | Sense | ID | Range | Antiense | ID | Range |
| Duplex Name | Sequence 5′ to 3′ | NO: | (NM_001710.5) | Sequence 5′ to 3′ | NO: | (NM_001710.5) |
| AD-558860.1 | UGCCAAGACUCCUUCAUGUAU | 449 | 930-950 | AUACAUGAAGGAGUCUUGGCAGG | 520 | 928-950 |
| AD-560018.1 | AAGAGAAGUCGUUUCAUUCAU | 450 | 2397-2417 | AUGAAUGAAACGACUUCUCUUGU | 521 | 2395-2417 |
| AD-560019.1 | AGAGAAGUCGUUUCAUUCAAU | 451 | 2398-2418 | AUUGAAUGAAACGACUUCUCUUG | 522 | 2396-2418 |
| AD-559160.1 | UAUGAAGACCACAAGUUGAAU | 452 | 1308-1328 | AUUCAACUUGUGGUCUUCAUAAU | 523 | 1306-1328 |
| AD-559921.1 | CGGAAGGAGGUCUACAUCAAU | 453 | 2202-2222 | AUUGAUGUAGACCUCCUUCCGAG | 524 | 2200-2222 |
| AD-559755.1 | AUCAAGCUCAAGAAUAAGCUU | 454 | 2016-2036 | AAGCUUAUUCUUGAGCUUGAUCA | 525 | 2014-2036 |
| AD-560017.1 | CAAGAGAAGUCGUUUCAUUCU | 455 | 2396-2416 | AGAAUGAAACGACUUCUCUUGUG | 526 | 2394-2416 |
| AD-559614.1 | CUGUGGUGUCUGAGUACUUUU | 456 | 1819-1839 | AAAAGUACUCAGACACCACAGCC | 527 | 1817-1839 |
| AD-559435.1 | AUGAGCAACAUGUGUUCAAAU | 457 | 1621-1641 | AUUUGAACACAUGUUGCUCAUUG | 528 | 1619-1641 |
| AD-560016.1 | ACAAGAGAAGUCGUUUCAUUU | 458 | 2395-2415 | AAAUGAAACGACUUCUCUUGUGA | 529 | 2393-2415 |
| AD-559451.1 | CAAAGUCAAGGAUAUGGAAAU | 459 | 1637-1657 | AUUUCCAUAUCCUUGACUUUGAA | 530 | 1635-1657 |
| AD-559617.1 | UGGUGUCUGAGUACUUUGUGU | 460 | 1822-1842 | ACACAAAGUACUCAGACACCACA | 531 | 1820-1842 |
| AD-560021.1 | AGAAGUCGUUUCAUUCAAGUU | 461 | 2400-2420 | AACUUGAAUGAAACGACUUCUCU | 532 | 2398-2420 |
| AD-559449.1 | UUCAAAGUCAAGGAUAUGGAU | 462 | 1635-1655 | AUCCAUAUCCUUGACUUUGAACA | 533 | 1633-1655 |
| AD-559450.1 | UCAAAGUCAAGGAUAUGGAAU | 463 | 1636-1656 | AUUCCAUAUCCUUGACUUUGAAC | 534 | 1634-1656 |
| AD-559925.1 | AGGAGGUCUACAUCAAGAAUU | 464 | 2206-2226 | AAUUCUUGAUGUAGACCUCCUUC | 535 | 2204-2226 |
| AD-559440.1 | CAACAUGUGUUCAAAGUCAAU | 465 | 1626-1646 | AUUGACUUUGAACACAUGUUGCU | 536 | 1624-1646 |
| AD-559788.1 | ACUAUCAGGCCCAUUUGUCUU | 466 | 2049-2069 | AAGACAAAUGGGCCUGAUAGUCU | 537 | 2047-2069 |
| AD-559437.1 | GAGCAACAUGUGUUCAAAGUU | 467 | 1623-1643 | AACUUUGAACACAUGUUGCUCAU | 538 | 1621-1643 |
| AD-559369.1 | AGGAUUAUCUGGAUGUCUAUU | 468 | 1537-1557 | AAUAGACAUCCAGAUAAUCCUCC | 539 | 1535-1557 |
| AD-559446.1 | GUGUUCAAAGUCAAGGAUAUU | 469 | 1632-1652 | AAUAUCCUUGACUUUGAACACAU | 540 | 1630-1652 |
| AD-559924.1 | AAGGAGGUCUACAUCAAGAAU | 470 | 2205-2225 | AUUCUUGAUGUAGACCUCCUUCC | 541 | 2203-2225 |
| AD-558965.1 | UCAGGCUCCAUGAACAUCUAU | 471 | 1074-1094 | AUAGAUGUUCAUGGAGCCUGAAG | 542 | 1072-1094 |
| AD-560045.1 | GUGGAUGUCUGCAAAAACCAU | 472 | 2442-2462 | AUGGUUUUUGCAGACAUCCACUA | 543 | 2440-2462 |
| AD-559946.1 | GUGAGAGAGAUGCUCAAUAUU | 473 | 2245-2265 | AAUAUUGAGCAUCUCUCUCACAG | 544 | 2243-2265 |
| AD-558697.1 | AUCGCACCUGCCAAGUGAAUU | 474 | 703-723 | AAUUCACUUGGCAGGUGCGAUUG | 545 | 701-723 |
| AD-559008.1 | UCACAGGAGCCAAAAAGUGUU | 475 | 1135-1155 | AACACUUUUUGGCUCCUGUGAAG | 546 | 1133-1155 |
| AD-559357.1 | AAAACCCAAGGGAGGAUUAUU | 476 | 1525-1545 | AAUAAUCCUCCCUUGGGUUUUUG | 547 | 1523-1545 |
| AD-559020.1 | AAAAGUGUCUAGUCAACUUAU | 477 | 1147-1167 | AUAAGUUGACUAGACACUUUUUG | 548 | 1145-1167 |
| AD-559143.1 | CAGCUCAAUGAAAUCAAUUAU | 478 | 1290-1310 | AUAAUUGAUUUCAUUGAGCUGCU | 549 | 1288-1310 |
| AD-559374.1 | UAUCUGGAUGUCUAUGUGUUU | 479 | 1542-1562 | AAACACAUAGACAUCCAGAUAAU | 550 | 1540-1562 |
| AD-560161.1 | GGCGUGGGAUUGAAUUAAAAU | 480 | 2594-2614 | AUUUUAAUUCAAUCCCACGCCCC | 551 | 2592-2614 |
| AD-559947.1 | UGAGAGAGAUGCUCAAUAUGU | 481 | 2246-2266 | ACAUAUUGAGCAUCUCUCUCACA | 552 | 2244-2266 |
| AD-559616.1 | GUGGUGUCUGAGUACUUUGUU | 482 | 1821-1841 | AACAAAGUACUCAGACACCACAG | 553 | 1819-1841 |
| AD-559142.1 | GCAGCUCAAUGAAAUCAAUUU | 483 | 1289-1309 | AAAUUGAUUUCAUUGAGCUGCUU | 554 | 1287-1309 |
| AD-558639.1 | CGGUCUCCCUACUACAAUGUU | 484 | 627-647 | AACAUUGUAGUAGGGAGACCGGG | 555 | 625-647 |
| AD-560166.1 | GGGAUUGAAUUAAAACAGCUU | 485 | 2599-2619 | AAGCUGUUUUAAUUCAAUCCCAC | 556 | 2597-2619 |
| AD-559359.1 | AACCCAAGGGAGGAUUAUCUU | 486 | 1527-1547 | AAGAUAAUCCUCCCUUGGGUUUU | 557 | 1525-1547 |
| AD-558657.1 | GUGAGUGAUGAGAUCUCUUUU | 487 | 645-665 | AAAAGAGAUCUCAUCACUCACAU | 558 | 643-665 |
| AD-559442.1 | ACAUGUGUUCAAAGUCAAGGU | 488 | 1628-1648 | ACCUUGACUUUGAACACAUGUUG | 559 | 1626-1648 |
| AD-559023.1 | AGUGUCUAGUCAACUUAAUUU | 489 | 1150-1170 | AAAUUAAGUUGACUAGACACUUU | 560 | 1148-1170 |
| AD-560160.1 | GGGCGUGGGAUUGAAUUAAAU | 490 | 2593-2613 | AUUUAAUUCAAUCCCACGCCCCU | 561 | 2591-2613 |
| AD-559398.1 | CAAGUGAACAUCAAUGCUUUU | 491 | 1584-1604 | AAAAGCAUUGAUGUUCACUUGGU | 562 | 1582-1604 |
| AD-559722.1 | AUUCCUGAAUUUUAUGACUAU | 492 | 1983-2003 | AUAGUCAUAAAAUUCAGGAAUUC | 563 | 1981-2003 |
| AD-559146.1 | CUCAAUGAAAUCAAUUAUGAU | 493 | 1293-1313 | AUCAUAAUUGAUUUCAUUGAGCU | 564 | 1291-1313 |
| AD-558267.1 | GGAUGUUCCGGGAAAGUGAUU | 494 | 55-75 | AAUCACUUUCCCGGAACAUCCAA | 565 | 53-75 |
| AD-559074.1 | GAUAUGGUCUAGUGACAUAUU | 495 | 1201-1221 | AAUAUGUCACUAGACCAUAUCUU | 566 | 1199-1221 |
| AD-560162.1 | GCGUGGGAUUGAAUUAAAACU | 496 | 2595-2615 | AGUUUUAAUUCAAUCCCACGCCC | 567 | 2593-2615 |
| AD-559021.1 | AAAGUGUCUAGUCAACUUAAU | 497 | 1148-1168 | AUUAAGUUGACUAGACACUUUUU | 568 | 1146-1168 |
| AD-559144.1 | AGCUCAAUGAAAUCAAUUAUU | 498 | 1291-1311 | AAUAAUUGAUUUCAUUGAGCUGC | 569 | 1289-1311 |
| AD-559147.1 | CAAUGAAAUCAAUUAUGAAGU | 499 | 1295-1315 | ACUUCAUAAUUGAUUUCAUUGAG | 570 | 1293-1315 |
| AD-560164.1 | GUGGGAUUGAAUUAAAACAGU | 500 | 2597-2617 | ACUGUUUUAAUUCAAUCCCACGC | 571 | 2595-2617 |
| AD-559714.1 | AAGCAGGAAUUCCUGAAUUUU | 501 | 1975-1995 | AAAAUUCAGGAAUUCCUGCUUCU | 572 | 1973-1995 |
| AD-560165.1 | UGGGAUUGAAUUAAAACAGCU | 502 | 2598-2618 | AGCUGUUUUAAUUCAAUCCCACG | 573 | 2596-2618 |
| AD-559300.1 | ACCCAAUUACUGUCAUUGAUU | 503 | 1468-1488 | AAUCAAUGACAGUAAUUGGGUCC | 574 | 1466-1488 |
| AD-559866.1 | CCCUGCACAGGAUAUCAAAGU | 504 | 2147-2167 | ACUUUGAUAUCCUGUGCAGGGAG | 575 | 2145-2167 |
| AD-559302.1 | CCAAUUACUGUCAUUGAUGAU | 505 | 1470-1490 | AUCAUCAAUGACAGUAAUUGGGU | 576 | 1468-1490 |
| AD-560163.1 | CGUGGGAUUGAAUUAAAACAU | 506 | 2596-2616 | AUGUUUUAAUUCAAUCCCACGCC | 577 | 2594-2616 |
| AD-559718.1 | AGGAAUUCCUGAAUUUUAUGU | 507 | 1979-1999 | ACAUAAAAUUCAGGAAUUCCUGC | 578 | 1977-1999 |
| AD-559721.1 | AAUUCCUGAAUUUUAUGACUU | 508 | 1982-2002 | AAGUCAUAAAAUUCAGGAAUUCC | 579 | 1980-2002 |
| AD-559026.1 | GUCUAGUCAACUUAAUUGAGU | 509 | 1153-1173 | ACUCAAUUAAGUUGACUAGACAC | 580 | 1151-1173 |
| AD-559719.1 | GGAAUUCCUGAAUUUUAUGAU | 510 | 1980-2000 | AUCAUAAAAUUCAGGAAUUCCUG | 581 | 1978-2000 |
| AD-559060.1 | UGGUGUGAAGCCAAGAUAUGU | 511 | 1187-1207 | ACAUAUCUUGGCUUCACACCAUA | 582 | 1185-1207 |
| AD-559864.1 | CUCCCUGCACAGGAUAUCAAU | 512 | 2145-2165 | AUUGAUAUCCUGUGCAGGGAGCA | 583 | 2143-2165 |
| AD-559059.1 | AUGGUGUGAAGCCAAGAUAUU | 513 | 1186-1206 | AAUAUCUUGGCUUCACACCAUAA | 584 | 1184-1206 |
| AD-559865.1 | UCCCUGCACAGGAUAUCAAAU | 514 | 2146-2166 | AUUUGAUAUCCUGUGCAGGGAGC | 585 | 2144-2166 |
| AD-559148.1 | AAUGAAAUCAAUUAUGAAGAU | 515 | 1296-1316 | AUCUUCAUAAUUGAUUUCAUUGA | 586 | 1294-1316 |
| AD-559375.1 | AUCUGGAUGUCUAUGUGUUUU | 516 | 1543-1563 | AAAACACAUAGACAUCCAGAUAA | 587 | 1541-1563 |
| AD-559393.1 | UGAACCAAGUGAACAUCAAUU | 517 | 1579-1599 | AAUUGAUGUUCACUUGGUUCACC | 588 | 1577-1599 |
| AD-559717.1 | CAGGAAUUCCUGAAUUUUAUU | 518 | 1978-1998 | AAUAAAAUUCAGGAAUUCCUGCU | 589 | 1976-1998 |
| AD-559392.1 | GUGAACCAAGUGAACAUCAAU | 519 | 1578-1598 | AUUGAUGUUCACUUGGUUCACCA | 590 | 1576-1598 |

TABLE 5
Modified Sense and Antisense Strand Sequences of Complement Factor B dsRNA Agents

| | | SEQ | | SEQ | | SEQ |
|---|---|---|---|---|---|---|
| | | ID | Antisense | ID | | ID |
| Duplex Name | Sense Sequence 5′ to 3′ | NO: | Sequence 5′ to 3′ | NO: | mRNA Target Sequence | NO: |
| AD-558860.1 | usgsccaaGfaCfUfCfcuucauguauL96 | 591 | asUfsacaUfgAfAfgg | 662 | CCUGCCAAGACUCCUUCAUGUAC | 733 |
| | | | agUfcUfuggcasgsg | | | |
| AD-560018.1 | asasgagaAfgUfCfGfuuucauucauL96 | 592 | asUfsgaaUfgAfAfac | 663 | ACAAGAGAAGUCGUUUCAUUCAA | 734 |
| | | | gaCfuUfcucuusgsu | | | |
| AD-560019.1 | asgsagaaGfuCfGfUfuucauucaauL96 | 593 | asUfsugaAfuGfAfaa | 664 | CAAGAGAAGUCGUUUCAUUCAAG | 735 |
| | | | cgAfcUfucucususg | | | |
| AD-559160.1 | usasugaaGfaCfCfAfcaaguugaauL96 | 594 | asUfsucaAfcUfUfgu | 665 | AUUAUGAAGACCACAAGUUGAAG | 736 |
| | | | ggUfcUfucauasasu | | | |
| AD-559921.1 | csgsgaagGfaGfGfUfcuacaucaauL96 | 595 | asUfsugaUfgUfAfga | 666 | CUCGGAAGGAGGUCUACAUCAAG | 737 |
| | | | ccUfcCfuuccgsasg | | | |
| AD-559755.1 | asuscaagCfuCfAfAfgaauaagcuuL96 | 596 | asAfsgcuUfaUfUfcu | 667 | UGAUCAAGCUCAAGAAUAAGCUG | 738 |
| | | | ugAfgCfuugauscsa | | | |
| AD-560017.1 | csasagagAfaGfUfCfguuucauucuL96 | 597 | asGfsaauGfaAfAfcg | 668 | CACAAGAGAAGUCGUUUCAUUCA | 739 |
| | | | acUfuCfucuugsusg | | | |
| AD-559614.1 | csusguggUfgUfCfUfgaguacuuuuL96 | 598 | asAfsaagUfaCfUfca | 669 | GGCUGUGGUGUCUGAGUACUUUG | 740 |
| | | | gaCfaCfcacagscsc | | | |
| AD-559435.1 | asusgagcAfaCfAfUfguguucaaauL96 | 599 | asUfsuugAfaCfAfca | 670 | CAAUGAGCAACAUGUGUUCAAAG | 741 |
| | | | ugUfuGfcucaususg | | | |
| AD-560016.1 | ascsaagaGfaAfGfUfcguuucauuuL96 | 600 | asAfsaugAfaAfCfga | 671 | UCACAAGAGAAGUCGUUUCAUUC | 742 |
| | | | cuUfcUfcuugusgsa | | | |
| AD-559451.1 | csasaaguCfaAfGfGfauauggaaauL96 | 601 | asUfsuucCfaUfAfuc | 672 | UUCAAAGUCAAGGAUAUGGAAAA | 743 |
| | | | cuUfgAfcuuugsasa | | | |
| AD-559617.1 | usgsguguCfuGfAfGfuacuuuguguL96 | 602 | asCfsacaAfaGfUfac | 673 | UGUGGUGUCUGAGUACUUUGUGC | 744 |
| | | | ucAfgAfcaccascsa | | | |
| AD-560021.1 | asgsaaguCfgUfUfUfcauucaaguuL96 | 603 | asAfscuuGfaAfUfga | 674 | AGAGAAGUCGUUUCAUUCAAGUU | 745 |
| | | | aaCfgAfcuucuscsu | | | |
| AD-559449.1 | ususcaaaGfuCfAfAfggauauggauL96 | 604 | asUfsccaUfaUfCfcu | 675 | UGUUCAAAGUCAAGGAUAUGGAA | 746 |
| | | | ugAfcUfuugaascsa | | | |
| AD-559450.1 | uscsaaagUfcAfAfGfgauauggaauL96 | 605 | asUfsuccAfuAfUfcc | 676 | GUUCAAAGUCAAGGAUAUGGAAA | 747 |
| | | | uuGfaCfuuugasasc | | | |
| AD-559925.1 | asgsgaggUfcUfAfCfaucaagaauuL96 | 606 | asAfsuucUfuGfAfug | 677 | GAAGGAGGUCUACAUCAAGAAUG | 748 |
| | | | uaGfaCfcuccususc | | | |
| AD-559440.1 | csasacauGfuGfUfUfcaaagucaauL96 | 607 | asUfsugaCfuUfUfga | 678 | AGCAACAUGUGUUCAAAGUCAAG | 749 |
| | | | acAfcAfuguugscsu | | | |
| AD-559788.1 | ascsuaucAfgGfCfCfcauuugucuuL96 | 608 | asAfsgacAfaAfUfgg | 679 | AGACUAUCAGGCCCAUUUGUCUC | 750 |
| | | | gcCfuGfauaguscsu | | | |
| AD-559437.1 | gsasgcaaCfaUfGfUfguucaaaguuL96 | 609 | asAfscuuUfgAfAfca | 680 | AUGAGCAACAUGUGUUCAAAGUC | 751 |
| | | | caUfgUfugcucsasu | | | |
| AD-559369.1 | asgsgauuAfuCfUfGfgaugucuauuL96 | 610 | asAfsuagAfcAfUfcc | 681 | GGAGGAUUAUCUGGAUGUCUAUG | 752 |
| | | | agAfuAfauccuscsc | | | |
| AD-559446.1 | gsusguucAfaAfGfUfcaaggauauuL96 | 611 | asAfsuauCfcUfUfga | 682 | AUGUGUUCAAAGUCAAGGAUAUG | 753 |
| | | | cuUfuGfaacacsasu | | | |
| AD-559924.1 | asasggagGfuCfUfAfcaucaagaauL96 | 612 | asUfsucuUfgAfUfgu | 683 | GGAAGGAGGUCUACAUCAAGAAU | 754 |
| | | | agAfcCfuccuuscsc | | | |
| AD-558965.1 | uscsaggcUfcCfAfUfgaacaucuauL96 | 613 | asUfsagaUfgUfUfca | 684 | CUUCAGGCUCCAUGAACAUCUAC | 755 |
| | | | ugGfaGfccugasasg | | | |
| AD-560045.1 | gsusggauGfuCfUfGfcaaaaaccauL96 | 614 | asUfsgguUfuUfUfgc | 685 | UAGUGGAUGUCUGCAAAAACCAG | 756 |
| | | | agAfcAfuccacsusa | | | |
| AD-559946.1 | gsusgagaGfaGfAfUfgcucaauauuL96 | 615 | asAfsuauUfgAfGfca | 686 | CUGUGAGAGAGAUGCUCAAUAUG | 757 |
| | | | ucUfcUfcucacsasg | | | |
| AD-558697.1 | asuscgcaCfcUfGfCfcaagugaauuL96 | 616 | asAfsuucAfcUfUfgg | 687 | CAAUCGCACCUGCCAAGUGAAUG | 758 |
| | | | caGfgUfgcgaususg | | | |
| AD-559008.1 | uscsacagGfaGfCfCfaaaaaguguuL96 | 617 | asAfscacUfuUfUfug | 688 | CUUCACAGGAGCCAAAAAGUGUC | 759 |
| | | | gcUfcCfugugasasg | | | |
| AD-559357.1 | asasaaccCfaAfGfGfgaggauuauuL96 | 618 | asAfsuaaUfcCfUfcc | 689 | CAAAAACCCAAGGGAGGAUUAUC | 760 |
| | | | cuUfgGfguuuususg | | | |
| AD-559020.1 | asasaaguGfuCfUfAfgucaacuuauL96 | 619 | asUfsaagUfuGfAfcu | 690 | CAAAAAGUGUCUAGUCAACUUAA | 761 |
| | | | agAfcAfcuuuususg | | | |
| AD-559143.1 | csasgcucAfaUfGfAfaaucaauuauL96 | 620 | asUfsaauUfgAfUfuu | 691 | AGCAGCUCAAUGAAAUCAAUUAU | 762 |
| | | | caUfuGfagcugscsu | | | |
| AD-559374.1 | usasucugGfaUfGfUfcuauguguuuL96 | 621 | asAfsacaCfaUfAfga | 692 | AUUAUCUGGAUGUCUAUGUGUUU | 763 |
| | | | caUfcCfagauasasu | | | |
| AD-560161.1 | gsgscgugGfgAfUfUfgaauuaaaauL96 | 622 | asUfsuuuAfaUfUfca | 693 | GGGGCGUGGGAUUGAAUUAAAAC | 764 |
| | | | auCfcCfacgccscsc | | | |
| AD-559947.1 | usgsagagAfgAfUfGfcucaauauguL96 | 623 | asCfsauaUfuGfAfgc | 694 | UGUGAGAGAGAUGCUCAAUAUGC | 765 |
| | | | auCfuCfucucascsa | | | |
| AD-559616.1 | gsusggugUfcUfGfAfguacuuuguuL96 | 624 | asAfscaaAfgUfAfcu | 695 | CUGUGGUGUCUGAGUACUUUGUG | 766 |
| | | | caGfaCfaccacsasg | | | |
| AD-559142.1 | gscsagcuCfaAfUfGfaaaucaauuuL96 | 625 | asAfsauuGfaUfUfuc | 696 | AAGCAGCUCAAUGAAAUCAAUUA | 767 |
| | | | auUfgAfgcugcsusu | | | |
| AD-558639.1 | csgsgucuCfcCfUfAfcuacaauguuL96 | 626 | asAfscauUfgUfAfgu | 697 | CCCGGUCUCCCUACUACAAUGUG | 768 |
| | | | agGfgAfgaccgsgsg | | | |
| AD-560166.1 | gsgsgauuGfaAfUfUfaaaacagcuuL96 | 627 | asAfsgcuGfuUfUfua | 698 | GUGGGAUUGAAUUAAAACAGCUG | 769 |
| | | | auUfcAfaucccsasc | | | |
| AD-559359.1 | asascccaAfgGfGfAfggauuaucuuL96 | 628 | asAfsgauAfaUfCfcu | 699 | AAAACCCAAGGGAGGAUUAUCUG | 770 |
| | | | ccCfuUfggguususu | | | |
| AD-558657.1 | gsusgaguGfaUfGfAfgaucucuuuuL96 | 629 | asAfsaagAfgAfUfcu | 700 | AUGUGAGUGAUGAGAUCUCUUUC | 771 |
| | | | caUfcAfcucacsasu | | | |
| AD-559442.1 | ascsauguGfuUfCfAfaagucaagguL96 | 630 | asCfscuuGfaCfUfuu | 701 | CAACAUGUGUUCAAAGUCAAGGA | 772 |
| | | | gaAfcAfcaugususg | | | |
| AD-559023.1 | asgsugucUfaGfUfCfaacuuaauuuL96 | 631 | asAfsauuAfaGfUfug | 702 | AAAGUGUCUAGUCAACUUAAUUG | 773 |
| | | | acUfaGfacacususu | | | |
| AD-560160.1 | gsgsgcguGfgGfAfUfugaauuaaauL96 | 632 | asUfsuuaAfuUfCfaa | 703 | AGGGGCGUGGGAUUGAAUUAAAA | 774 |
| | | | ucCfcAfcgcccscsu | | | |
| AD-559398.1 | csasagugAfaCfAfUfcaaugcuuuuL96 | 633 | asAfsaagCfaUfUfga | 704 | ACCAAGUGAACAUCAAUGCUUUG | 775 |
| | | | ugUfuCfacuugsgsu | | | |
| AD-559722.1 | asusuccuGfaAfUfUfuuaugacuauL96 | 634 | asUfsaguCfaUfAfaa | 705 | GAAUUCCUGAAUUUUAUGACUAU | 776 |
| | | | auUfcAfggaaususc | | | |
| AD-559146.1 | csuscaauGfaAfAfUfcaauuaugauL96 | 635 | asUfscauAfaUfUfga | 706 | AGCUCAAUGAAAUCAAUUAUGAA | 777 |
| | | | uuUfcAfuugagscsu | | | |
| AD-558267.1 | gsgsauguUfcCfGfGfgaaagugauuL96 | 636 | asAfsucaCfuUfUfcc | 707 | UUGGAUGUUCCGGGAAAGUGAUG | 778 |
| | | | cgGfaAfcauccsasa | | | |
| AD-559074.1 | gsasuaugGfuCfUfAfgugacauauuL96 | 637 | asAfsuauGfuCfAfcu | 708 | AAGAUAUGGUCUAGUGACAUAUG | 779 |
| | | | agAfcCfauaucsusu | | | |
| AD-560162.1 | gscsguggGfaUfUfGfaauuaaaacuL96 | 638 | asGfsuuuUfaAfUfuc | 709 | GGGCGUGGGAUUGAAUUAAAACA | 780 |
| | | | aaUfcCfcacgcscsc | | | |
| AD-559021.1 | asasagugUfcUfAfGfucaacuuaauL96 | 639 | asUfsuaaGfuUfGfac | 710 | AAAAAGUGUCUAGUCAACUUAAU | 781 |
| | | | uaGfaCfacuuususu | | | |
| AD-559144.1 | asgscucaAfuGfAfAfaucaauuauuL96 | 640 | asAfsuaaUfuGfAfuu | 711 | GCAGCUCAAUGAAAUCAAUUAUG | 782 |
| | | | ucAfuUfgagcusgsc | | | |
| AD-559147.1 | csasaugaAfaUfCfAfauuaugaaguL96 | 641 | asCfsuucAfuAfAfuu | 712 | CUCAAUGAAAUCAAUUAUGAAGA | 783 |
| | | | gaUfuUfcauugsasg | | | |
| AD-560164.1 | gsusgggaUfuGfAfAfuuaaaacaguL96 | 642 | asCfsuguUfuUfAfau | 713 | GCGUGGGAUUGAAUUAAAACAGC | 784 |
| | | | ucAfaUfcccacsgsc | | | |
| AD-559714.1 | asasgcagGfaAfUfUfccugaauuuuL96 | 643 | asAfsaauUfcAfGfga | 714 | AGAAGCAGGAAUUCCUGAAUUUU | 785 |
| | | | auUfcCfugcuuscsu | | | |
| AD-560165.1 | usgsggauUfgAfAfUfuaaaacagcuL96 | 644 | asGfscugUfuUfUfaa | 715 | CGUGGGAUUGAAUUAAAACAGCU | 786 |
| | | | uuCfaAfucccascsg | | | |
| AD-559300.1 | ascsccaaUfuAfCfUfgucauugauuL96 | 645 | asAfsucaAfuGfAfca | 716 | GGACCCAAUUACUGUCAUUGAUG | 787 |
| | | | guAfaUfuggguscsc | | | |
| AD-559866.1 | cscscugcAfcAfGfGfauaucaaaguL96 | 646 | asCfsuuuGfaUfAfuc | 717 | CUCCCUGCACAGGAUAUCAAAGC | 788 |
| | | | cuGfuGfcagggsasg | | | |
| AD-559302.1 | cscsaauuAfcUfGfUfcauugaugauL96 | 647 | asUfscauCfaAfUfga | 718 | ACCCAAUUACUGUCAUUGAUGAG | 789 |
| | | | caGfuAfauuggsgsu | | | |
| AD-560163.1 | csgsugggAfuUfGfAfauuaaaacauL96 | 648 | asUfsguuUfuAfAfuu | 719 | GGCGUGGGAUUGAAUUAAAACAG | 790 |
| | | | caAfuCfccacgscsc | | | |
| AD-559718.1 | asgsgaauUfcCfUfGfaauuuuauguL96 | 649 | asCfsauaAfaAfUfuc | 720 | GCAGGAAUUCCUGAAUUUUAUGA | 791 |
| | | | agGfaAfuuccusgsc | | | |
| AD-559721.1 | asasuuccUfgAfAfUfuuuaugacuuL96 | 650 | asAfsgucAfuAfAfaa | 721 | GGAAUUCCUGAAUUUUAUGACUA | 792 |
| | | | uuCfaGfgaauuscsc | | | |
| AD-559026.1 | gsuscuagUfcAfAfCfuuaauugaguL96 | 651 | asCfsucaAfuUfAfag | 722 | GUGUCUAGUCAACUUAAUUGAGA | 793 |
| | | | uuGfaCfuagacsasc | | | |
| AD-559719.1 | gsgsaauuCfcUfGfAfauuuuaugauL96 | 652 | asUfscauAfaAfAfuu | 723 | CAGGAAUUCCUGAAUUUUAUGAC | 794 |
| | | | caGfgAfauuccsusg | | | |
| AD-559060.1 | usgsguguGfaAfGfCfcaagauauguL96 | 653 | asCfsauaUfcUfUfgg | 724 | UAUGGUGUGAAGCCAAGAUAUGG | 795 |
| | | | cuUfcAfcaccasusa | | | |
| AD-559864.1 | csuscccuGfcAfCfAfggauaucaauL96 | 654 | asUfsugaUfaUfCfcu | 725 | UGCUCCCUGCACAGGAUAUCAAA | 796 |
| | | | guGfcAfgggagscsa | | | |
| AD-559059.1 | asusggugUfgAfAfGfccaagauauuL96 | 655 | asAfsuauCfuUfGfgc | 726 | UUAUGGUGUGAAGCCAAGAUAUG | 797 |
| | | | uuCfaCfaccausasa | | | |
| AD-559865.1 | uscsccugCfaCfAfGfgauaucaaauL96 | 656 | asUfsuugAfuAfUfcc | 727 | GCUCCCUGCACAGGAUAUCAAAG | 798 |
| | | | ugUfgCfagggasgsc | | | |
| AD-559148.1 | asasugaaAfuCfAfAfuuaugaagauL96 | 657 | asUfscuuCfaUfAfau | 728 | UCAAUGAAAUCAAUUAUGAAGAC | 799 |
| | | | ugAfuUfucauusgsa | | | |
| AD-559375.1 | asuscuggAfuGfUfCfuauguguuuuL96 | 658 | asAfsaacAfcAfUfag | 729 | UUAUCUGGAUGUCUAUGUGUUUG | 800 |
| | | | acAfuCfcagausasa | | | |
| AD-559393.1 | usgsaaccAfaGfUfGfaacaucaauuL96 | 659 | asAfsuugAfuGfUfuc | 730 | GGUGAACCAAGUGAACAUCAAUG | 801 |
| | | | acUfuGfguucascsc | | | |
| AD-559717.1 | csasggaaUfuCfCfUfgaauuuuauuL96 | 660 | asAfsuaaAfaUfUfca | 731 | AGCAGGAAUUCCUGAAUUUUAUG | 802 |
| | | | ggAfaUfuccugscsu | | | |
| AD-559392.1 | gsusgaacCfaAfGfUfgaacaucaauL96 | 661 | asUfsugaUfgUfUfca | 732 | UGGUGAACCAAGUGAACAUCAAU | 803 |
| | | | cuUfgGfuucacscsa | | | |

TABLE 6
Unmodified Sense and Antisense Strand Sequences of Complement Factor B dsRNA Agents

| | | SEQ | | | SEQ | |
|---|---|---|---|---|---|---|
| Duplex | Sense | ID | | Antisense | ID | Antisense |
| Name | Sequence 5′ to 3′ | NO: | Sense Source Name | Sequence 5′ to 3′ | NO: | Source Name |
| AD- | UGCCAAGAUUCCUUCAUG | 804 | NM_008198.2_1051- | AUACAUGAAGGAAUCUUGG | 849 | NM_008198.2_1049- |
| 560969.1 | UAU | | 1071_s | CAGG | | 1071_as |
| AD- | AUGUGUUUAAAGUCAAGG | 805 | NM_008198.2_1751- | AAUCCUTGACUUUAAACACA | 850 | NM_008198.2_1749- |
| 561537.1 | AUU | | 1771_A21U_s | UGA | | 1771_U1A_as |
| AD- | AAAGAUGAGGAUUUGGGU | 806 | NM_008198.2_2668- | AAAACCCAAAUCCUCAUCUU | 851 | NM_008198.2_2666- |
| 562262.1 | UUU | | 2688_s | UGA | | 2688_as |
| AD- | AAGGAUGUCAAAGCUCUG | 807 | NM_008198.2_2275- | AAACAGAGCUUUGACAUCC | 852 | NM_008198.2_2273- |
| 561960.1 | UUU | | 2295_s | UUCA | | 2295_as |
| AD- | CUACCAAAUGAUUGAUGA | 808 | NM_008198.2_1794- | AUUUCATCAAUCAUUUGGU | 853 | NM_008198.2_1792- |
| 561580.1 | AAU | | 1814_C21U_s | AGAA | | 1814_G1A_as |
| AD- | AUCAGUUAUGAAGACCAC | 809 | NM_008198.2_1423- | AUUGUGGUCUUCAUAACUG | 854 | NM_008198.2_1421- |
| 561254.1 | AAU | | 1443_G21U_s | AUUU | | 1443_C1A_as |
| AD- | UUCUACCAAAUGAUUGAU | 810 | NM_008198.2_1792- | AUCAUCAAUCAUUUGGUAG | 855 | NM_008198.2_1790- |
| 561578.1 | GAU | | 1812_A21U_s | AAAA | | 1812_U1A_as |
| AD- | UGUGUUUAAAGUCAAGGA | 811 | NM_008198.2_1752- | AUAUCCTUGACUUUAAACAC | 856 | NM_008198.2_1750- |
| 561538.1 | UAU | | 1772_s | AUG | | 1772_as |
| AD- | AAAUCAGUUAUGAAGACC | 812 | NM_008198.2_1421- | AGUGGUCUUCAUAACUGAU | 857 | NM_008198.2_1419- |
| 561252.1 | ACU | | 1441_A21U_s | UUGG | | 1441_U1A_as |
| AD- | GAUGUCAAAGCUCUGUUU | 813 | NM_008198.2_2278- | AACAAACAGAGCUUUGACA | 858 | NM_008198.2_2276- |
| 561963.1 | GUU | | 2298_A21U_s | UCCU | | 2298_U1A_as |
| AD- | CCAGUUGUGAGAGAGAUG | 814 | NM_008198.2_2360- | AAGCAUCUCUCUCACAACUG | 859 | NM_008198.2_2358- |
| 562027.1 | CUU | | 2380_A21U_s | GCU | | 2380_U1A_as |
| AD- | AGCCAAGAUCUCAGUCAC | 815 | NM_008198.2_1887- | AGAGUGACUGAGAUCUUGG | 860 | NM_008198.2_1885- |
| 561653.1 | UCU | | 1907_G21U_s | CUUG | | 1907_C1A_as |
| AD- | CGCUUCAUUCAAGUUGGU | 816 | NM_008198.2_2527- | AACACCAACUUGAAUGAAG | 861 | NM_008198.2_2525- |
| 562137.1 | GUU | | 2547_G21U_s | CGGC | | 2547_C1A_as |
| AD- | CAUGUGUUUAAAGUCAAG | 817 | NM_008198.2_1750- | AUCCUUGACUUUAAACACA | 862 | NM_008198.2_1748- |
| 561536.1 | GAU | | 1770_s | UGAU | | 1770_as |
| AD- | AAUCAGUUAUGAAGACCA | 818 | NM_008198.2_1422- | AUGUGGTCUUCAUAACUGA | 863 | NM_008198.2_1420- |
| 561253.1 | CAU | | 1442 A21U_s | UUUG | | 1442_U1A_as |
| AD- | GAAGGAUGUCAAAGCUCU | 819 | NM_008198.2_2274- | AACAGAGCUUUGACAUCCU | 864 | NM_008198.2_2272- |
| 561959.1 | GUU | | 2294_s | UCAC | | 2294_as |
| AD- | AUGUUUUCUACCAAAUGA | 820 | NM_008198.2_1787- | AAAUCATUUGGUAGAAAAC | 865 | NM_008198.2_1785- |
| 561573.1 | UUU | | 1807_G21U_s | AUUC | | 1807_C1A_as |
| AD- | CAAGCCAAGAUCUCAGUC | 821 | NM_008198.2_1885- | AGUGACTGAGAUCUUGGCU | 866 | NM_008198.2_1883- |
| 561651.1 | ACU | | 1905_s | UGCC | | 1905_as |
| AD- | ACCAACUUGAUUGAGAAG | 822 | NM_008198.2_1279- | AACCUUCUCAAUCAAGUUG | 867 | NM_008198.2_1277- |
| 561148.1 | GUU | | 1299_G21U_s | GUGA | | 1299_C1A_as |
| AD- | GGAUGUCAAAGCUCUGUU | 823 | NM_008198.2_2277- | ACAAACAGAGCUUUGACAU | 868 | NM_008198.2_2275- |
| 561962.1 | UGU | | 2297_s | CCUU | | 2297_as |
| AD- | AGAUGAGGAUUUGGGUUU | 824 | NM_001710.5_2549- | AGAAAACCCAAAUCCUCAUC | 869 | NM_008198.2_2668- |
| 562237.1 | UCU | | 2569_s | UUU | | 2690_as |
| AD- | GCCAAGAUCUCAGUCACU | 825 | NM_008198.2_1888- | ACGAGUGACUGAGAUCUUG | 870 | NM_008198.2_1886- |
| 561654.1 | CGU | | 1908_C21U_s | GCUU | | 1908_G1A_as |
| AD- | CCGCUUCAUUCAAGUUGG | 826 | NM_008198.2_2526- | ACACCAACUUGAAUGAAGC | 871 | NM_008198.2_2524- |
| 562136.1 | UGU | | 2546_s | GGCU | | 2546_as |
| AD- | GCCAGUUGUGAGAGAGAU | 827 | NM_008198.2_2359- | AGCAUCTCUCUCACAACUGG | 872 | NM_008198.2_2357- |
| 562026.1 | GCU | | 2379_s | CUU | | 2379_as |
| AD- | UCCAUGAAUAUCUACCUG | 828 | NM_008198.2_1201- | AACCAGGUAGAUAUUCAUG | 873 | NM_008198.2_1199- |
| 561101.1 | GUU | | 1221_G21U_s | GAGC | | 1221_C1A_as |
| AD- | GUGUUUAAAGUCAAGGAU | 829 | NM_008198.2_1753- | AAUAUCCUUGACUUUAAAC | 874 | NM_008198.2_1751- |
| 561539.1 | AUU | | 1773_G21U_s | ACAU | | 1773_C1A_as |
| AD- | AGGAUGUCAAAGCUCUGU | 830 | NM_008198.2_2276- | AAAACAGAGCUUUGACAUC | 875 | NM_008198.2_2274- |
| 561961.1 | UUU | | 2296_G21U_s | CUUC | | 2296_C1A_as |
| AD- | UCAUGUGUUUAAAGUCAA | 831 | NM_008198.2_1749- | ACCUUGACUUUAAACACAU | 876 | NM_008198.2_1747- |
| 561535.1 | GGU | | 1769_A21U_s | GAUG | | 1769_U1A_as |
| AD- | AAGCCAAGAUCUCAGUCA | 832 | NM_008198.2_1886- | AAGUGACUGAGAUCUUGGC | 877 | NM_008198.2_1884- |
| 561652.1 | CUU | | 1906_C21U_s | UUGC | | 1906_G1A_as |
| AD- | UCAAAGAUGAGGAUUUGG | 833 | NM_008198.2_2666- | AACCCAAAUCCUCAUCUUUG | 878 | NM_008198.2_2664- |
| 562260.1 | GUU | | 2686_s | AGC | | 2686_as |
| AD- | UGGUGCUAGAUGGAUCAG | 72 | NM_001710.5_1096- | AGUCUGAUCCAUCUAGCACC | 158 | NM_001710.5_1094- |
| 557041.2 | ACU | | 1116_A21U_s | AGG | | 1116_U1A_as |
| AD- | CCAAGAUCUCAGUCACUC | 834 | NM_008198.2_1889- | AGCGAGTGACUGAGAUCUU | 879 | NM_008198.2_1887- |
| 561655.1 | GCU | | 1909_C21U_s | GGCU | | 1909_G1A_as |
| AD- | GUGCUAGAUGGAUCAGAC | 835 | NM_001710.5_1098- | ACUGUCTGAUCCAUCUAGCA | 880 | NM_001710.5_1096- |
| 557043.1 | AGU | | 1118_C21U_s | CCA | | 1118_G1A_as |
| AD- | CAAAUCUCUGAGUCUCUG | 836 | NM_008198.2_1815- | ACACAGAGACUCAGAGAUU | 881 | NM_008198.2_1813- |
| 561603.1 | UGU | | 1835_G21U_s | UGGU | | 1835_C1A_as |
| AD- | UGCUAGAUGGAUCAGACA | 837 | NM_001710.5_1099- | AGCUGUCUGAUCCAUCUAGC | 882 | NM_001710.5_1097- |
| 557044.1 | GCU | | 1119_A21U_s | ACC | | 1119_U1A_as |
| AD- | GACCACAAGCUGAAGUCA | 838 | NM_008198.2_1435- | ACCUGACUUCAGCUUGUGG | 883 | NM_008198.2_1433- |
| 561266.1 | GGU | | 1455_G21U_s | UCUU | | 1455_C1A_as |
| AD- | GUUUAAAGUCAAGGAUAU | 839 | NM_008198.2_1755- | ACCAUATCCUUGACUUUAAA | 884 | NM_008198.2_1753- |
| 561541.1 | GGU | | 1775_A21U_s | CAC | | 1775_U1A_as |
| AD- | AGCUCAAAGAUGAGGAUU | 840 | NM_008198.2_2663- | ACAAAUCCUCAUCUUUGAGC | 885 | NM_008198.2_2661- |
| 562257.1 | UGU | | 2683_G21U_s | UUG | | 2683_C1A_as |
| AD- | GAGGGAGUAGAGAUCAAA | 841 | NM_008198.2_517- | ACCUUUGAUCUCUACUCCCU | 886 | NM_008198.2_515- |
| 560538.1 | GGU | | 537_C21U_s | CCA | | 537_G1A_as |
| AD- | UCUACCAAAUGAUUGAUG | 842 | NM_008198.2_1793- | AUUCAUCAAUCAUUUGGUA | 887 | NM_008198.2_1791- |
| 561579.1 | AAU | | 1813_A21U_s | GAAA | | 1813_U1A_as |
| AD- | CUCAAAGAUGAGGAUUUG | 843 | NM_008198.2_2665- | ACCCAAAUCCUCAUCUUUGA | 888 | NM_008198.2_2663- |
| 562259.1 | GGU | | 2685_s | GCU | | 2685_as |
| AD- | CUGCCAAGAUUCCUUCAU | 844 | NM_008198.2_1050- | AACAUGAAGGAAUCUUGGC | 889 | NM_008198.2_1048- |
| 560968.1 | GUU | | 1070_A21U_s | AGGA | | 1070_U1A_as |
| AD- | AUGGCAAGCCAAGAUCUC | 845 | NM_008198.2_1881- | ACUGAGAUCUUGGCUUGCC | 890 | NM_008198.2_1879- |
| 561647.1 | AGU | | 1901_s | AUGG | | 1901_as |
| AD- | CCUGGAUGUGUAUGUGUU | 846 | NM_008198.2_1665- | ACAAACACAUACACAUCCAG | 891 | NM_008198.2_1663- |
| 561469.1 | UGU | | 1685_G21U_s | GUA | | 1685_C1A_as |
| AD- | UGUUUAAAGUCAAGGAUA | 847 | NM_008198.2_1754- | ACAUAUCCUUGACUUUAAA | 892 | NM_008198.2_1752- |
| 561540.1 | UGU | | 1774_G21U_s | CACA | | 1774_C1A_as |
| AD- | GCCGCUUCAUUCAAGUUG | 848 | NM_008198.2_2525- | AACCAACUUGAAUGAAGCG | 893 | NM_008198.2_2523- |
| 562135.1 | GUU | | 2545_G21U_s | GCUU | | 2545_C1A_as |

TABLE 7
Modified Sense and Antisense Strand Sequences of Complement Factor B dsRNA Agents

| | | SEQ | | SEQ | | SEQ |
|---|---|---|---|---|---|---|
| | | ID | Antisense | ID | | ID |
| Duplex Name | Sense Sequence 5′ to 3′ | NO: | Sequence 5′ to 3′ | NO: | mRNA Target Sequence | NO: |
| AD-560969.1 | usgsccaaGfaUfUfCfcuucauguauL96 | 894 | asUfsacau(Ggn)aag | 939 | CCUGCCAAGAUUCCUUCAUGUAU | 984 |
| | | | gaaUfcUfuggcasgsg | | | |
| AD-561537.1 | asusguguUfuAfAfAfgucaaggauuL96 | 895 | asAfsuccu(Tgn)gac | 940 | UCAUGUGUUUAAAGUCAAGGAUA | 985 |
| | | | uuuAfaAfcacausgsa | | | |
| AD-562262.1 | asasagauGfaGfGfAfuuuggguuuuL96 | 896 | asAfsaacc(Cgn)aaa | 941 | UCAAAGAUGAGGAUUUGGGUUUU | 986 |
| | | | uccUfcAfucuuusgsa | | | |
| AD-561960.1 | asasggauGfuCfAfAfagcucuguuuL96 | 897 | asAfsacag(Agn)gcu | 942 | UGAAGGAUGUCAAAGCUCUGUUU | 987 |
| | | | uugAfcAfuccuuscsa | | | |
| AD-561580.1 | csusaccaAfaUfGfAfuugaugaaauL96 | 898 | asUfsuuca(Tgn)caa | 943 | UUCUACCAAAUGAUUGAUGAAAC | 988 |
| | | | ucaUfuUfgguagsasa | | | |
| AD-561254.1 | asuscaguUfaUfGfAfagaccacaauL96 | 899 | asUfsugug(Ggn)ucu | 944 | AAAUCAGUUAUGAAGACCACAAG | 989 |
| | | | ucaUfaAfcugaususu | | | |
| AD-561578.1 | ususcuacCfaAfAfUfgauugaugauL96 | 900 | asUfscauc(Agn)auc | 945 | UUUUCUACCAAAUGAUUGAUGAA | 990 |
| | | | auuUfgGfuagaasasa | | | |
| AD-561538.1 | usgsuguuUfaAfAfGfucaaggauauL96 | 901 | asUfsaucc(Tgn)uga | 946 | CAUGUGUUUAAAGUCAAGGAUAU | 991 |
| | | | cuuUfaAfacacasusg | | | |
| AD-561252.1 | asasaucaGfuUfAfUfgaagaccacuL96 | 902 | asGfsuggu(Cgn)uuc | 947 | CCAAAUCAGUUAUGAAGACCACA | 992 |
| | | | auaAfcUfgauuusgsg | | | |
| AD-561963.1 | gsasugucAfaAfGfCfucuguuuguuL96 | 903 | asAfscaaa(Cgn)aga | 948 | AGGAUGUCAAAGCUCUGUUUGUA | 993 |
| | | | gcuUfuGfacaucscsu | | | |
| AD-562027.1 | cscsaguuGfuGfAfGfagagaugcuuL96 | 904 | asAfsgcau(Cgn)ucu | 949 | AGCCAGUUGUGAGAGAGAUGCUA | 994 |
| | | | cucAfcAfacuggscsu | | | |
| AD-561653.1 | asgsccaaGfaUfCfUfcagucacucuL96 | 905 | asGfsagug(Agn)cug | 950 | CAAGCCAAGAUCUCAGUCACUCG | 995 |
| | | | agaUfcUfuggcususg | | | |
| AD-562137.1 | csgscuucAfuUfCfAfaguugguguuL96 | 906 | asAfscacc(Agn)acu | 951 | GCCGCUUCAUUCAAGUUGGUGUG | 996 |
| | | | ugaAfuGfaagcgsgsc | | | |
| AD-561536.1 | csasugugUfuUfAfAfagucaaggauL96 | 907 | asUfsccuu(Ggn)acu | 952 | AUCAUGUGUUUAAAGUCAAGGAU | 997 |
| | | | uuaAfaCfacaugsasu | | | |
| AD-561253.1 | asasucagUfuAfUfGfaagaccacauL96 | 908 | asUfsgugg(Tgn)cuu | 953 | CAAAUCAGUUAUGAAGACCACAA | 998 |
| | | | cauAfaCfugauususg | | | |
| AD-561959.1 | gsasaggaUfgUfCfAfaagcucuguuL96 | 909 | asAfscaga(Ggn)cuu | 954 | GUGAAGGAUGUCAAAGCUCUGUU | 999 |
| | | | ugaCfaUfccuucsasc | | | |
| AD-561573.1 | asusguuuUfcUfAfCfcaaaugauuuL96 | 910 | asAfsauca(Tgn)uug | 955 | GAAUGUUUUCUACCAAAUGAUUG | 1000 |
| | | | guaGfaAfaacaususc | | | |
| AD-561651.1 | csasagccAfaGfAfUfcucagucacuL96 | 911 | asGfsugac(Tgn)gag | 956 | GGCAAGCCAAGAUCUCAGUCACU | 1001 |
| | | | aucUfuGfgcuugscsc | | | |
| AD-561148.1 | ascscaacUfuGfAfUfugagaagguuL96 | 912 | asAfsccuu(Cgn)uca | 957 | UCACCAACUUGAUUGAGAAGGUG | 1002 |
| | | | aucAfaGfuuggusgsa | | | |
| AD-561962.1 | gsgsauguCfaAfAfGfcucuguuuguL96 | 913 | asCfsaaac(Agn)gag | 958 | AAGGAUGUCAAAGCUCUGUUUGU | 1003 |
| | | | cuuUfgAfcauccsusu | | | |
| AD-562237.1 | asgsaugaGfgAfUfUfuggguuuucuL96 | 914 | asGfsaaaa(Cgn)cca | 959 | AAGAUGAGGAUUUGGGUUUUCU | 1004 |
| | | | aauCfcUfcaucususu | | | |
| AD-561654.1 | gscscaagAfuCfUfCfagucacucguL96 | 915 | asCfsgagu(Ggn)acu | 960 | AAGCCAAGAUCUCAGUCACUCGC | 1005 |
| | | | gagAfuCfuuggcsusu | | | |
| AD-562136.1 | cscsgcuuCfaUfUfCfaaguugguguL96 | 916 | asCfsacca(Agn)cuu | 961 | AGCCGCUUCAUUCAAGUUGGUGU | 1006 |
| | | | gaaUfgAfagcggscsu | | | |
| AD-562026.1 | gscscaguUfgUfGfAfgagagaugcuL96 | 917 | asGfscauc(Tgn)cuc | 962 | AAGCCAGUUGUGAGAGAGAUGCU | 1007 |
| | | | ucaCfaAfcuggcsusu | | | |
| AD-561101.1 | uscscaugAfaUfAfUfcuaccugguuL96 | 918 | asAfsccag(Ggn)uag | 963 | GCUCCAUGAAUAUCUACCUGGUG | 1008 |
| | | | auaUfuCfauggasgsc | | | |
| AD-561539.1 | gsusguuuAfaAfGfUfcaaggauauuL96 | 919 | asAfsuauc(Cgn)uug | 964 | AUGUGUUUAAAGUCAAGGAUAUG | 1009 |
| | | | acuUfuAfaacacsasu | | | |
| AD-561961.1 | asgsgaugUfcAfAfAfgcucuguuuuL96 | 920 | asAfsaaca(Ggn)agc | 965 | GAAGGAUGUCAAAGCUCUGUUUG | 1010 |
| | | | uuuGfaCfauccususc | | | |
| AD-561535.1 | uscsauguGfuUfUfAfaagucaagguL96 | 921 | asCfscuug(Agn)cuu | 966 | CAUCAUGUGUUUAAAGUCAAGGA | 1011 |
| | | | uaaAfcAfcaugasusg | | | |
| AD-561652.1 | asasgccaAfgAfUfCfucagucacuuL96 | 922 | asAfsguga(Cgn)uga | 967 | GCAAGCCAAGAUCUCAGUCACUC | 1012 |
| | | | gauCfuUfggcuusgsc | | | |
| AD-562260.1 | uscsaaagAfuGfAfGfgauuuggguuL96 | 923 | asAfsccca(Agn)auc | 968 | GCUCAAAGAUGAGGAUUUGGGUU | 1013 |
| | | | cucAfuCfuuugasgsc | | | |
| AD-557041.2 | usgsgugcUfaGfAfUfggaucagacuL96 | 244 | asGfsucug(Agn)ucc | 330 | CCUGGUGCUAGAUGGAUCAGACA | 416 |
| | | | aucUfaGfcaccasgsg | | | |
| AD-561655.1 | cscsaagaUfcUfCfAfgucacucgcuL96 | 924 | asGfscgag(Tgn)gac | 969 | AGCCAAGAUCUCAGUCACUCGCC | 1014 |
| | | | ugaGfaUfcuuggscsu | | | |
| AD-557043.1 | gsusgcuaGfaUfGfGfaucagacaguL96 | 925 | asCfsuguc(Tgn)gau | 970 | UGGUGCUAGAUGGAUCAGACAGC | 1015 |
| | | | ccaUfcUfagcacscsa | | | |
| AD-561603.1 | csasaaucUfcUfGfAfgucucuguguL96 | 926 | asCfsacag(Agn)gac | 971 | ACCAAAUCUCUGAGUCUCUGUGG | 1016 |
| | | | ucaGfaGfauuugsgsu | | | |
| AD-557044.1 | usgscuagAfuGfGfAfucagacagcuL96 | 927 | asGfscugu(Cgn)uga | 972 | GGUGCUAGAUGGAUCAGACAGCA | 1017 |
| | | | uccAfuCfuagcascsc | | | |
| AD-561266.1 | gsasccacAfaGfCfUfgaagucagguL96 | 928 | asCfscuga(Cgn)uuc | 973 | AAGACCACAAGCUGAAGUCAGGG | 1018 |
| | | | agcUfuGfuggucsusu | | | |
| AD-561541.1 | gsusuuaaAfgUfCfAfaggauaugguL96 | 929 | asCfscaua(Tgn)ccu | 974 | GUGUUUAAAGUCAAGGAUAUGGA | 1019 |
| | | | ugaCfuUfuaaacsasc | | | |
| AD-562257.1 | asgscucaAfaGfAfUfgaggauuuguL96 | 930 | asCfsaaau(Cgn)cuc | 975 | CAAGCUCAAAGAUGAGGAUUUGG | 1020 |
| | | | aucUfuUfgagcususg | | | |
| AD-560538.1 | gsasgggaGfuAfGfAfgaucaaagguL96 | 931 | asCfscuuu(Ggn)auc | 976 | UGGAGGGAGUAGAGAUCAAAGGC | 1021 |
| | | | ucuAfcUfcccucscsa | | | |
| AD-561579.1 | uscsuaccAfaAfUfGfauugaugaauL96 | 932 | asUfsucau(Cgn)aau | 977 | UUUCUACCAAAUGAUUGAUGAAA | 1022 |
| | | | cauUfuGfguagasasa | | | |
| AD-562259.1 | csuscaaaGfaUfGfAfggauuuggguL96 | 933 | asCfsccaa(Agn)ucc | 978 | AGCUCAAAGAUGAGGAUUUGGGU | 1023 |
| | | | ucaUfcUfuugagscsu | | | |
| AD-560968.1 | csusgccaAfgAfUfUfccuucauguuL96 | 934 | asAfscaug(Agn)agg | 979 | UCCUGCCAAGAUUCCUUCAUGUA | 1024 |
| | | | aauCfuUfggcagsgsa | | | |
| AD-561647.1 | asusggcaAfgCfCfAfagaucucaguL96 | 935 | asCfsugag(Agn)ucu | 980 | CCAUGGCAAGCCAAGAUCUCAGU | 1025 |
| | | | uggCfuUfgccausgsg | | | |
| AD-561469.1 | cscsuggaUfgUfGfUfauguguuuguL96 | 936 | asCfsaaac(Agn)cau | 981 | UACCUGGAUGUGUAUGUGUUUGG | 1026 |
| | | | acaCfaUfccaggsusa | | | |
| AD-561540.1 | usgsuuuaAfaGfUfCfaaggauauguL96 | 937 | asCfsauau(Cgn)cuu | 982 | UGUGUUUAAAGUCAAGGAUAUGG | 1027 |
| | | | gacUfuUfaaacascsa | | | |
| AD-562135.1 | gscscgcuUfcAfUfUfcaaguugguuL96 | 938 | asAfsccaa(Cgn)uug | 983 | AAGCCGCUUCAUUCAAGUUGGUG | 1028 |
| | | | aauGfaAfgcggcsusu | | | |

TABLE 8
Complement Factor B In Vitro Single Dose Screens
in Hep3B cells

| | 10 nM | 1 nM | 0.1 nM |
|---|---|---|---|
| | % of | % of | % of |
| | Message | Message | Message |
| DuplexID | Remaining | Remaining | Remaining |
| AD-557072.1 | 4.99 | 8.87 | 40.99 |
| AD-558097.1 | 5.00 | 11.75 | 45.33 |
| AD-557068.1 | 9.00 | 22.78 | 53.22 |
| AD-557774.1 | 6.55 | 17.23 | 52.48 |
| AD-557070.1 | 7.33 | 21.06 | 54.78 |
| AD-558225.1 | 19.10 | 29.43 | 106.87 |
| AD-558065.1 | 12.21 | 24.28 | 61.24 |
| AD-557853.1 | 9.39 | 35.28 | 55.01 |
| AD-556919.1 | 20.01 | 27.64 | 138.66 |
| AD-557859.1 | 13.46 | 25.92 | 104.56 |
| AD-557069.1 | 11.26 | 29.35 | 54.36 |
| AD-558068.1 | 14.59 | 21.63 | 48.67 |
| AD-557422.1 | 14.87 | 27.15 | 55.45 |
| AD-558096.1 | 10.81 | 26.65 | 76.39 |
| AD-557084.1 | 28.07 | 54.88 | 138.96 |
| AD-558076.1 | 13.06 | 24.15 | 42.77 |
| AD-558063.1 | 20.24 | 28.87 | 54.49 |
| AD-558069.1 | 17.70 | 27.78 | 53.41 |
| AD-558061.1 | 19.59 | 36.04 | 48.88 |
| AD-558066.1 | 23.98 | 44.12 | 51.72 |
| AD-556581.1 | 22.46 | 67.53 | 186.97 |
| AD-557079.1 | 9.97 | 41.07 | 71.40 |
| AD-558012.1 | 17.26 | 35.39 | 112.72 |
| AD-556701.1 | 9.91 | 23.66 | 62.85 |
| AD-557782.1 | 13.23 | 45.66 | 53.87 |
| AD-557498.1 | 28.16 | 56.57 | 131.91 |
| AD-556788.1 | 33.88 | 58.98 | 118.02 |
| AD-557078.1 | 18.18 | 50.25 | 80.91 |
| AD-557852.1 | 40.94 | 60.36 | 167.53 |
| AD-557353.1 | 23.37 | 44.41 | 62.52 |
| AD-557041.1 | 26.00 | 87.78 | 110.85 |
| AD-556786.1 | 51.74 | 66.59 | 90.96 |
| AD-556734.1 | 29.10 | 54.88 | 70.13 |
| AD-557475.1 | 26.95 | 50.54 | 65.87 |
| AD-557972.1 | 63.07 | 77.45 | 71.99 |
| AD-556390.1 | 31.40 | 46.72 | 72.19 |
| AD-556963.1 | 42.99 | 68.75 | 146.93 |
| AD-558078.1 | 30.67 | 83.78 | 62.14 |
| AD-557204.1 | 40.18 | 69.41 | 199.62 |
| AD-556962.1 | 67.05 | 92.06 | 80.95 |
| AD-556733.1 | 34.07 | 61.86 | 62.03 |
| AD-556724.1 | 43.85 | 114.37 | 225.16 |
| AD-557067.1 | 42.27 | 59.20 | 67.56 |
| AD-557602.1 | 39.99 | 70.66 | 155.25 |
| AD-557345.1 | 45.66 | 91.09 | 186.86 |
| AD-557969.1 | 70.94 | 72.23 | 72.25 |
| AD-557867.1 | 43.92 | 108.43 | 178.41 |
| AD-557860.1 | 49.94 | 63.71 | 134.13 |
| AD-557868.1 | 52.22 | 99.81 | 112.51 |
| AD-558064.1 | 61.63 | 72.39 | 59.83 |
| AD-556725.1 | 45.46 | 62.37 | 68.67 |
| AD-556787.1 | 58.40 | 102.98 | 163.60 |
| AD-558062.1 | 55.53 | 70.65 | 156.02 |
| AD-556874.1 | 83.34 | 90.67 | 62.04 |
| AD-557066.1 | 75.61 | 93.55 | 168.75 |
| AD-556791.1 | 64.56 | 74.17 | 75.36 |
| AD-557450.1 | 56.23 | 68.84 | 77.40 |
| AD-557865.1 | 66.83 | 94.99 | 153.50 |
| AD-556961.1 | 69.87 | 93.70 | 206.00 |
| AD-556920.1 | 52.86 | 81.48 | 188.46 |
| AD-558074.1 | 74.73 | 132.35 | 71.18 |
| AD-556738.1 | 72.67 | 123.81 | 206.91 |
| AD-558004.1 | 100.55 | 103.41 | 190.48 |
| AD-556918.1 | 85.53 | 97.13 | 199.73 |
| AD-557209.1 | 84.13 | 96.02 | 140.72 |
| AD-557861.1 | 66.07 | 84.41 | 120.27 |
| AD-557226.1 | 83.39 | 94.85 | 123.74 |
| AD-557856.1 | 84.68 | 85.69 | 137.01 |
| AD-557839.1 | 114.79 | 91.84 | 69.49 |
| AD-557873.1 | 84.73 | 102.93 | 65.71 |
| AD-557417.1 | 88.08 | 115.91 | 225.81 |
| AD-558106.1 | 95.90 | 110.10 | 217.75 |
| AD-557788.1 | 87.87 | 109.59 | 129.42 |
| AD-556917.1 | 79.04 | 71.81 | 78.26 |
| AD-556739.1 | 87.37 | 115.81 | 70.32 |
| AD-556726.1 | 96.01 | 129.96 | 221.48 |
| AD-556790.1 | 109.55 | 118.05 | 193.15 |
| AD-557604.1 | 74.95 | 133.00 | 177.11 |
| AD-557495.1 | 96.32 | 130.00 | 254.48 |
| AD-557016.1 | 106.90 | 131.43 | 110.73 |
| AD-558105.1 | 77.28 | 73.82 | 85.07 |
| AD-557872.1 | 102.16 | 123.17 | 172.64 |
| AD-557346.1 | 113.18 | 138.10 | 228.78 |
| AD-557851.1 | 107.51 | 138.22 | 178.85 |
| AD-557786.1 | 117.86 | 149.34 | 168.00 |
| AD-557857.1 | 118.52 | 127.67 | 145.90 |

TABLE 9
Complement Factor B In Vitro Single Dose Screens in Hep3B cells

| | 10 nM | | 1 nM | | 0.1 nM | |
|---|---|---|---|---|---|---|
| | Dose % of | | Dose % of | | Dose % of | |
| | Message | | Message | | Message | |
| DuplexID | Remaining | STDEV | Remaining | STDEV | Remaining | STDEV |
| AD-558657.1 | 4.81 | 0.55 | 6.98 | 1.27 | 24.75 | 5.46 |
| AD-559020.1 | 5.18 | 0.75 | 7.21 | 1.31 | 17.95 | 3.88 |
| AD-559023.1 | 7.71 | 0.93 | 9.85 | 2.87 | 32.65 | 5.12 |
| AD-558860.1 | 8.35 | 1.69 | 14.34 | 1.97 | 33.70 | 7.41 |
| AD-559143.1 | 8.57 | 1.09 | 11.19 | 1.02 | 28.52 | 7.22 |
| AD-559021.1 | 8.65 | 3.21 | 13.97 | 4.56 | 42.99 | 5.93 |
| AD-559144.1 | 9.25 | 0.94 | 16.75 | 3.32 | 33.52 | 2.97 |
| AD-559435.1 | 10.47 | 0.85 | 13.57 | 1.00 | 38.94 | 5.33 |
| AD-560019.1 | 10.57 | 0.67 | 12.96 | 1.19 | 17.67 | 1.23 |
| AD-559722.1 | 11.24 | 1.35 | 19.04 | 1.63 | 42.16 | 2.85 |
| AD-560016.1 | 11.42 | 1.30 | 17.54 | 2.39 | 28.72 | 3.63 |
| AD-559008.1 | 11.51 | 3.34 | 17.60 | 0.78 | 45.58 | 15.60 |
| AD-560018.1 | 11.76 | 1.89 | 16.87 | 2.51 | 28.83 | 4.60 |
| AD-560045.1 | 12.13 | 1.71 | 28.22 | 11.60 | 53.32 | 14.16 |
| AD-559375.1 | 12.45 | 1.28 | 21.86 | 1.78 | 61.75 | 7.34 |
| AD-559142.1 | 13.01 | 2.52 | 20.98 | 3.88 | 43.82 | 6.89 |
| AD-559160.1 | 13.06 | 3.15 | 19.02 | 1.35 | 47.19 | 7.99 |
| AD-559374.1 | 13.17 | 3.28 | 27.58 | 5.37 | 72.78 | 11.80 |
| AD-559369.1 | 13.75 | 0.79 | 25.72 | 0.58 | 62.74 | 6.62 |
| AD-559148.1 | 13.81 | 1.72 | 25.39 | 1.60 | 53.03 | 5.36 |
| AD-560163.1 | 14.11 | 0.87 | 20.31 | 1.31 | 49.05 | 4.99 |
| AD-559398.1 | 14.23 | 3.97 | 18.11 | 2.34 | 46.53 | 6.07 |
| AD-559060.1 | 14.39 | 3.41 | 32.15 | 3.07 | 62.25 | 5.65 |
| AD-559392.1 | 14.69 | 3.59 | 21.68 | 2.40 | 55.88 | 8.59 |
| AD-559451.1 | 14.84 | 3.18 | 25.50 | 3.19 | 43.71 | 5.05 |
| AD-559721.1 | 15.23 | 3.73 | 23.03 | 3.34 | 51.33 | 10.51 |
| AD-559146.1 | 15.26 | 5.05 | 28.14 | 1.99 | 71.88 | 8.41 |
| AD-560165.1 | 15.74 | 2.70 | 25.08 | 2.14 | 65.45 | 14.31 |
| AD-559921.1 | 15.99 | 1.86 | 19.91 | 4.59 | 38.78 | 9.90 |
| AD-560021.1 | 16.02 | 3.62 | 37.73 | 4.08 | 58.59 | 3.73 |
| AD-560164.1 | 16.23 | 2.00 | 22.73 | 3.67 | 63.13 | 4.12 |
| AD-559614.1 | 16.27 | 4.70 | 31.75 | 4.73 | 49.34 | 6.16 |
| AD-559393.1 | 16.46 | 3.99 | 31.63 | 4.04 | 61.56 | 10.13 |
| AD-559717.1 | 16.68 | 1.69 | 20.78 | 3.33 | 42.46 | 10.02 |
| AD-560017.1 | 16.71 | 2.32 | 28.04 | 3.35 | 57.72 | 16.22 |
| AD-559440.1 | 16.90 | 1.64 | 27.94 | 4.84 | 50.75 | 9.54 |
| AD-560166.1 | 17.02 | 4.84 | 20.01 | 3.95 | 58.88 | 13.01 |
| AD-559059.1 | 17.61 | 5.82 | 33.74 | 3.87 | 59.15 | 7.45 |
| AD-559300.1 | 17.90 | 5.18 | 34.67 | 2.86 | 67.79 | 6.31 |
| AD-559946.1 | 18.11 | 1.61 | 36.74 | 5.04 | 62.70 | 7.20 |
| AD-559147.1 | 18.33 | 2.11 | 47.39 | 7.94 | 85.39 | 10.23 |
| AD-559755.1 | 19.99 | 5.12 | 26.88 | 2.30 | 52.33 | 10.49 |
| AD-559446.1 | 20.58 | 2.25 | 30.84 | 7.47 | 64.13 | 7.62 |
| AD-559026.1 | 21.11 | 2.49 | 41.40 | 14.50 | 65.91 | 11.08 |
| AD-559714.1 | 22.71 | 0.91 | 32.56 | 2.47 | 69.69 | 6.49 |
| AD-560160.1 | 22.85 | 5.07 | 28.30 | 2.24 | 65.27 | 9.41 |
| AD-559437.1 | 25.76 | 4.50 | 44.87 | 12.58 | 78.13 | 8.91 |
| AD-560162.1 | 25.95 | 4.26 | 43.29 | 5.64 | 71.14 | 20.99 |
| AD-560161.1 | 26.34 | 3.19 | 38.91 | 4.83 | 68.19 | 5.53 |
| AD-559924.1 | 26.34 | 8.91 | 36.46 | 3.90 | 57.07 | 6.32 |
| AD-559865.1 | 27.49 | 2.47 | 47.05 | 6.32 | 75.04 | 14.94 |
| AD-559449.1 | 28.57 | 3.20 | 54.33 | 4.83 | 70.39 | 14.64 |
| AD-559788.1 | 28.70 | 6.51 | 62.57 | 7.45 | 79.25 | 8.07 |
| AD-559617.1 | 29.43 | 9.48 | 67.18 | 6.78 | 88.54 | 10.81 |
| AD-559719.1 | 30.38 | 3.11 | 55.82 | 5.69 | 83.18 | 12.99 |
| AD-559718.1 | 32.51 | 3.42 | 57.77 | 8.99 | 82.88 | 18.79 |
| AD-558697.1 | 32.69 | 5.66 | 44.32 | 3.45 | 58.56 | 7.73 |
| AD-559357.1 | 33.33 | 3.84 | 33.06 | 4.91 | 59.41 | 16.08 |
| AD-558965.1 | 35.13 | 2.66 | 34.85 | 11.29 | 51.66 | 15.94 |
| AD-558267.1 | 37.43 | 7.93 | 35.43 | 6.56 | 40.76 | 7.84 |
| AD-558639.1 | 37.99 | 5.49 | 46.82 | 7.78 | 44.37 | 7.45 |
| AD-559925.1 | 39.15 | 17.96 | 74.82 | 7.86 | 75.18 | 4.17 |
| AD-559450.1 | 40.47 | 6.34 | 63.09 | 4.35 | 53.12 | 12.34 |
| AD-559302.1 | 41.61 | 5.63 | 59.86 | 3.32 | 79.54 | 9.58 |
| AD-559074.1 | 41.79 | 3.21 | 57.94 | 3.73 | 62.36 | 5.75 |
| AD-559947.1 | 43.30 | 2.71 | 66.78 | 11.57 | 73.55 | 7.33 |
| AD-559442.1 | 47.58 | 8.47 | 69.78 | 10.91 | 92.36 | 7.58 |
| AD-559359.1 | 48.10 | 2.37 | 86.83 | 11.09 | 102.01 | 6.31 |
| AD-559616.1 | 50.68 | 6.63 | 93.13 | 11.78 | 88.54 | 12.26 |
| AD-559864.1 | 63.01 | 11.07 | 91.70 | 12.15 | 89.75 | 13.66 |
| AD-559866.1 | 85.15 | 11.86 | 94.33 | 6.79 | 79.14 | 12.77 |

TABLE 10
Complement Factor B In Vitro Single Dose Screens in Primary Mouse Hepatocytes
(PMH)

| | 10 nM | | 1 nM | | 0.1 nM | |
|---|---|---|---|---|---|---|
| | Dose % of | | Dose % of | | Dose % of | |
| | Message | | Message | | Message | |
| DuplexID | Remaining | STDEV | Remaining | STDEV | Remaining | STDEV |
| AD-558860.1 | 10.33 | 2.38 | 40.10 | 5.03 | 94.64 | 11.07 |
| AD-560018.1 | 13.28 | 3.25 | 64.35 | 11.23 | 114.97 | 8.99 |
| AD-560019.1 | 18.44 | 3.65 | 75.46 | 18.65 | 118.42 | 14.85 |
| AD-559160.1 | 19.42 | 3.01 | 47.55 | 4.18 | 125.03 | 7.48 |
| AD-559921.1 | 20.12 | 3.89 | 67.51 | 6.36 | 123.87 | 9.76 |
| AD-559755.1 | 20.65 | 5.45 | 77.24 | 11.02 | 117.00 | 9.54 |
| AD-560017.1 | 22.11 | 5.43 | 82.72 | 11.41 | 123.23 | 4.98 |
| AD-559614.1 | 23.18 | 7.36 | 67.15 | 7.61 | 123.18 | 19.54 |
| AD-559435.1 | 25.13 | 3.68 | 66.19 | 8.46 | 118.78 | 11.85 |
| AD-560016.1 | 25.40 | 5.70 | 91.81 | 22.08 | 128.76 | 16.87 |
| AD-559451.1 | 27.47 | 9.44 | 71.89 | 12.25 | 137.27 | 20.14 |
| AD-559617.1 | 29.70 | 10.00 | 84.66 | 4.39 | 140.37 | 6.69 |
| AD-560021.1 | 32.74 | 4.65 | 91.51 | 4.21 | 126.40 | 12.31 |
| AD-559449.1 | 37.90 | 5.63 | 82.95 | 9.33 | 130.52 | 19.04 |
| AD-559450.1 | 38.55 | 8.96 | 87.87 | 22.39 | 129.90 | 7.64 |
| AD-559925.1 | 38.62 | 3.39 | 90.35 | 10.90 | 104.75 | 5.55 |
| AD-559440.1 | 39.15 | 5.87 | 82.63 | 10.21 | 124.84 | 7.74 |
| AD-559788.1 | 42.67 | 7.18 | 114.25 | 12.73 | 138.37 | 4.54 |
| AD-559437.1 | 45.26 | 10.40 | 94.10 | 7.91 | 130.12 | 11.84 |
| AD-559369.1 | 47.64 | 10.56 | 83.98 | 9.74 | 136.96 | 5.52 |
| AD-559446.1 | 49.32 | 10.27 | 104.76 | 13.05 | 141.33 | 23.45 |
| AD-559924.1 | 56.47 | 10.68 | 101.50 | 14.50 | 131.17 | 5.61 |
| AD-558965.1 | 58.30 | 14.89 | 94.61 | 10.27 | 109.17 | 5.25 |
| AD-560045.1 | 68.96 | 6.99 | 94.93 | 5.17 | 98.24 | 5.15 |
| AD-559946.1 | 74.67 | 7.51 | 116.30 | 7.12 | 108.08 | 6.00 |
| AD-558697.1 | 79.21 | 8.58 | 103.00 | 11.53 | 141.24 | 23.63 |
| AD-559008.1 | 79.41 | 8.78 | 103.11 | 8.12 | 103.48 | 5.21 |
| AD-559357.1 | 81.03 | 4.45 | 95.92 | 5.13 | 110.83 | 8.24 |
| AD-559020.1 | 82.26 | 11.63 | 98.50 | 12.69 | 102.20 | 4.21 |
| AD-559143.1 | 82.37 | 15.28 | 97.44 | 5.47 | 104.94 | 5.93 |
| AD-559374.1 | 85.24 | 7.46 | 89.59 | 3.03 | 130.94 | 10.46 |
| AD-560161.1 | 85.46 | 17.44 | 91.49 | 7.11 | 106.52 | 4.01 |
| AD-559947.1 | 86.06 | 13.19 | 115.94 | 7.06 | 118.65 | 5.89 |
| AD-559616.1 | 86.75 | 7.61 | 115.52 | 9.47 | 134.57 | 3.86 |
| AD-559142.1 | 87.22 | 10.07 | 88.47 | 5.77 | 96.92 | 5.92 |
| AD-558639.1 | 87.64 | 13.26 | 99.95 | 4.27 | 122.33 | 12.04 |
| AD-560166.1 | 88.71 | 22.04 | 104.01 | 13.19 | 97.42 | 5.90 |
| AD-559359.1 | 89.05 | 14.80 | 104.69 | 7.55 | 123.70 | 6.43 |
| AD-558657.1 | 89.59 | 11.42 | 95.66 | 6.61 | 109.56 | 9.31 |
| AD-559442.1 | 90.05 | 26.12 | 107.09 | 17.30 | 152.65 | 17.71 |
| AD-559023.1 | 93.44 | 12.18 | 96.28 | 8.79 | 116.18 | 4.76 |
| AD-560160.1 | 93.98 | 12.77 | 106.07 | 14.37 | 96.30 | 1.99 |
| AD-559398.1 | 94.15 | 14.19 | 89.68 | 5.33 | 141.12 | 7.36 |
| AD-559722.1 | 94.20 | 7.15 | 114.34 | 13.25 | 128.86 | 17.84 |
| AD-559146.1 | 94.84 | 7.07 | 94.68 | 6.79 | 150.36 | 18.96 |
| AD-558267.1 | 96.73 | 10.58 | 101.69 | 8.01 | 107.42 | 7.77 |
| AD-559074.1 | 99.75 | 10.40 | 91.77 | 6.74 | 132.38 | 20.72 |
| AD-560162.1 | 100.49 | 17.85 | 98.34 | 9.70 | 99.71 | 7.13 |
| AD-559021.1 | 102.22 | 20.82 | 100.57 | 9.81 | 143.53 | 24.85 |
| AD-559144.1 | 105.28 | 4.70 | 98.16 | 9.44 | 149.08 | 20.99 |
| AD-559147.1 | 106.45 | 27.57 | 89.01 | 4.30 | 147.67 | 22.58 |
| AD-560164.1 | 106.73 | 13.72 | 97.25 | 8.25 | 103.76 | 7.45 |
| AD-559714.1 | 107.80 | 24.01 | 130.26 | 16.11 | 139.71 | 8.34 |
| AD-560165.1 | 108.93 | 14.81 | 100.31 | 4.51 | 95.90 | 5.35 |
| AD-559300.1 | 111.25 | 11.78 | 90.58 | 4.56 | 134.36 | 10.29 |
| AD-559866.1 | 112.76 | 7.74 | 123.50 | 10.25 | 143.37 | 8.58 |
| AD-559302.1 | 113.89 | 12.96 | 90.69 | 3.34 | 112.12 | 19.35 |
| AD-560163.1 | 114.10 | 15.54 | 92.44 | 9.83 | 107.52 | 5.99 |
| AD-559718.1 | 114.19 | 9.34 | 139.34 | 10.12 | 143.95 | 10.17 |
| AD-559721.1 | 115.30 | 17.06 | 116.42 | 5.04 | 143.90 | 13.34 |
| AD-559026.1 | 115.85 | 15.27 | 95.64 | 12.87 | 132.32 | 13.74 |
| AD-559719.1 | 116.22 | 12.55 | 130.31 | 6.06 | 150.76 | 26.42 |
| AD-559060.1 | 117.05 | 20.30 | 95.06 | 4.36 | 141.26 | 25.56 |
| AD-559864.1 | 118.44 | 9.57 | 134.91 | 10.92 | 143.92 | 22.59 |
| AD-559059.1 | 120.63 | 14.40 | 94.88 | 3.85 | 154.23 | 9.79 |
| AD-559865.1 | 123.03 | 9.71 | 134.45 | 14.17 | 142.24 | 10.43 |
| AD-559148.1 | 123.28 | 10.25 | 91.36 | 4.38 | 156.95 | 14.94 |
| AD-559375.1 | 125.42 | 7.77 | 96.09 | 8.53 | 148.89 | 19.81 |
| AD-559393.1 | 126.82 | 14.36 | 97.97 | 6.13 | 142.67 | 16.86 |
| AD-559717.1 | 131.20 | 6.00 | 131.80 | 6.57 | 148.89 | 12.67 |
| AD-559392.1 | 134.26 | 21.19 | 96.35 | 2.77 | 130.60 | 8.29 |

TABLE 11
Complement Factor B In Vitro Single Dose Screens in
Primary Mouse Hepatocytes (PMH)

| | 10 nM | | 1 nM | | 0.1 nM | |
|---|---|---|---|---|---|---|
| | Dose % of | | Dose % of | | Dose % of | |
| | Message | | Message | | Message | |
| DuplexID | Remaining | STDEV | Remaining | STDEV | Remaining | STDEV |
| AD-560969.1 | 1.76 | 0.44 | 12.85 | 2.32 | 72.08 | 7.11 |
| AD-561537.1 | 1.97 | 0.30 | 13.11 | 1.38 | 57.66 | 1.85 |
| AD-562262.1 | 2.07 | 0.40 | 14.20 | 2.60 | 54.79 | 3.33 |
| AD-561960.1 | 2.82 | 0.45 | 15.86 | 1.84 | 76.74 | 10.88 |
| AD-561580.1 | 2.88 | 1.59 | 18.55 | 1.98 | 69.39 | 11.71 |
| AD-561254.1 | 2.89 | 0.86 | 15.62 | 4.05 | 61.84 | 5.51 |
| AD-561578.1 | 2.95 | 0.42 | 25.93 | 1.50 | 76.75 | 7.73 |
| AD-561538.1 | 3.50 | 0.97 | 4.45 | 1.11 | 31.69 | 5.04 |
| AD-561252.1 | 3.60 | 1.65 | 16.00 | 2.58 | 59.33 | 6.64 |
| AD-561963.1 | 3.62 | 0.30 | 29.50 | 8.22 | 81.62 | 4.93 |
| AD-562027.1 | 3.89 | 0.78 | 23.89 | 5.04 | 70.54 | 7.81 |
| AD-561653.1 | 4.01 | 0.74 | 23.82 | 3.53 | 80.62 | 7.07 |
| AD-562137.1 | 4.14 | 1.55 | 24.06 | 11.00 | 69.61 | 6.62 |
| AD-561536.1 | 4.21 | 1.10 | 29.07 | 5.79 | 80.38 | 5.28 |
| AD-561253.1 | 5.04 | 1.15 | 27.31 | 6.10 | 68.27 | 12.61 |
| AD-561959.1 | 5.17 | 1.81 | 50.97 | 13.35 | 90.71 | 8.16 |
| AD-561573.1 | 5.38 | 0.27 | 33.50 | 11.42 | 91.06 | 13.14 |
| AD-561651.1 | 6.36 | 1.01 | 49.06 | 2.79 | 92.69 | 9.37 |
| AD-561148.1 | 6.36 | 0.87 | 38.00 | 1.38 | 89.30 | 12.00 |
| AD-561962.1 | 7.16 | 1.19 | 36.21 | 6.11 | 91.19 | 5.39 |
| AD-562237.1 | 8.80 | 2.07 | 53.16 | 6.31 | 86.16 | 11.24 |
| AD-561654.1 | 9.91 | 1.61 | 55.56 | 7.65 | 101.67 | 5.04 |
| AD-562136.1 | 10.27 | 0.81 | 62.46 | 9.28 | 97.86 | 7.44 |
| AD-562026.1 | 11.34 | 1.47 | 60.69 | 2.81 | 89.22 | 3.89 |
| AD-561101.1 | 11.78 | 2.75 | 62.67 | 4.18 | 84.92 | 9.50 |
| AD-561539.1 | 12.00 | 1.31 | 53.65 | 10.81 | 84.80 | 12.57 |
| AD-561961.1 | 14.01 | 2.50 | 58.58 | 7.03 | 101.01 | 6.13 |
| AD-561535.1 | 14.27 | 3.13 | 70.96 | 10.08 | 103.90 | 12.70 |
| AD-561652.1 | 16.40 | 3.40 | 64.57 | 7.97 | 96.09 | 9.38 |
| AD-562260.1 | 19.73 | 4.82 | 77.55 | 5.09 | 91.07 | 8.78 |
| AD-557041.2 | 25.76 | 5.84 | 50.26 | 6.69 | 93.59 | 0.72 |
| AD-561655.1 | 26.16 | 3.41 | 80.98 | 7.80 | 102.69 | 10.61 |
| AD-557043.1 | 27.03 | 3.02 | 69.48 | 3.50 | 95.16 | 3.84 |
| AD-561603.1 | 31.99 | 4.57 | 78.55 | 6.25 | 86.39 | 7.35 |
| AD-557044.1 | 38.05 | 3.97 | 53.45 | 3.97 | 90.84 | 7.63 |
| AD-561266.1 | 38.64 | 2.80 | 79.00 | 6.75 | 89.14 | 5.01 |
| AD-561541.1 | 45.60 | 6.83 | 92.73 | 1.82 | 107.60 | 8.31 |
| AD-562257.1 | 52.27 | 2.66 | 93.01 | 8.78 | 100.58 | 4.10 |
| AD-560538.1 | 57.85 | 5.71 | 92.26 | 2.62 | 102.77 | 6.06 |
| AD-561579.1 | 65.71 | 10.54 | 91.74 | 8.83 | 101.05 | 6.91 |
| AD-562259.1 | 66.28 | 3.34 | 91.38 | 7.85 | 96.23 | 5.92 |
| AD-560968.1 | 73.08 | 6.97 | 87.16 | 9.40 | 100.89 | 2.47 |
| AD-561647.1 | 74.09 | 6.95 | 96.10 | 5.34 | 103.62 | 8.94 |
| AD-561469.1 | 78.98 | 10.38 | 91.17 | 7.11 | 102.25 | 6.72 |
| AD-561540.1 | 84.14 | 6.35 | 95.72 | 4.13 | 104.96 | 9.90 |
| AD-562135.1 | 87.86 | 10.90 | 102.43 | 11.38 | 102.47 | 11.43 |

TABLE 12
Complement Factor B In Vitro Single Dose Screens in Hep3B Cells

| | 10 nM | | 1 nM | | 0.1 nM | |
|---|---|---|---|---|---|---|
| | Dose % of | | Dose % of | | Dose % of | |
| | Message | | Message | | Message | |
| DuplexID | Remaining | STDEV | Remaining | STDEV | Remaining | STDEV |
| AD-560969.1 | 29.34 | 1.71 | 71.22 | 4.40 | 88.98 | 14.10 |
| AD-561537.1 | 86.96 | 7.93 | 84.92 | 6.56 | 97.67 | 11.01 |
| AD-562262.1 | 19.99 | 1.52 | 43.30 | 9.67 | 77.20 | 2.33 |
| AD-561960.1 | 101.89 | 7.12 | 93.06 | 6.78 | 86.95 | 11.28 |
| AD-561580.1 | 77.04 | 4.88 | 72.79 | 13.33 | 99.51 | 7.87 |
| AD-561254.1 | 47.27 | 3.23 | 59.31 | 9.89 | 80.05 | 5.60 |
| AD-561578.1 | 17.62 | 1.52 | 54.39 | 5.50 | 86.17 | 9.50 |
| AD-561538.1 | 14.90 | 6.97 | 24.45 | 3.87 | 42.19 | 9.11 |
| AD-561252.1 | 93.27 | 11.00 | 96.17 | 6.74 | 78.24 | 13.72 |
| AD-561963.1 | 40.07 | 4.40 | 63.17 | 10.68 | 84.66 | 8.57 |
| AD-562027.1 | 77.41 | 4.07 | 84.74 | 1.64 | 95.86 | 11.49 |
| AD-561653.1 | 44.48 | 8.74 | 68.46 | 11.39 | 101.86 | 10.10 |
| AD-562137.1 | 12.14 | 2.49 | 35.01 | 5.57 | 63.19 | 12.92 |
| AD-561536.1 | 81.78 | 6.45 | 107.20 | 6.41 | 72.90 | 5.20 |
| AD-561253.1 | 83.43 | 9.54 | 84.78 | 15.70 | 70.37 | 8.01 |
| AD-561959.1 | 78.06 | 6.19 | 70.68 | 2.99 | 89.62 | 9.10 |
| AD-561573.1 | 62.25 | 8.08 | 74.47 | 7.81 | 69.74 | 13.65 |
| AD-561651.1 | 65.86 | 6.99 | 94.78 | 14.92 | 86.37 | 10.00 |
| AD-561148.1 | 85.70 | 6.64 | 93.17 | 12.36 | 96.96 | 10.73 |
| AD-561962.1 | 73.24 | 4.15 | 104.85 | 7.06 | 105.02 | 11.38 |
| AD-562237.1 | 35.58 | 3.42 | 62.94 | 2.85 | 82.87 | 12.89 |
| AD-561654.1 | 68.27 | 6.59 | 84.86 | 8.20 | 88.86 | 16.82 |
| AD-562136.1 | 43.50 | 5.85 | 96.79 | 6.07 | 97.96 | 8.53 |
| AD-562026.1 | 78.57 | 11.58 | 92.78 | 9.79 | 100.53 | 12.79 |
| AD-561101.1 | 80.42 | 8.87 | 88.94 | 8.58 | 78.42 | 5.79 |
| AD-561539.1 | 73.75 | 9.48 | 70.46 | 13.02 | 81.45 | 11.45 |
| AD-561961.1 | 93.29 | 14.09 | 102.04 | 3.89 | 82.92 | 14.39 |
| AD-561535.1 | 90.31 | 7.87 | 100.89 | 9.09 | 89.58 | 10.53 |
| AD-561652.1 | 99.83 | 14.12 | 86.03 | 11.59 | 99.32 | 15.07 |
| AD-562260.1 | 72.75 | 4.48 | 93.46 | 5.11 | 91.71 | 18.08 |
| AD-557041.2 | 18.62 | 0.85 | 50.98 | 12.96 | 78.19 | 10.26 |
| AD-561655.1 | 81.07 | 2.83 | 92.73 | 6.74 | 73.97 | 11.80 |
| AD-557043.1 | 28.86 | 4.75 | 81.11 | 7.28 | 91.72 | 10.13 |
| AD-561603.1 | 46.27 | 14.44 | 99.22 | 11.97 | 86.19 | 7.73 |
| AD-557044.1 | 23.45 | 2.59 | 74.62 | 9.75 | 79.77 | 7.73 |
| AD-561266.1 | 105.79 | 5.46 | 95.99 | 11.36 | 99.59 | 2.26 |
| AD-561541.1 | 100.77 | 11.65 | 98.43 | 4.85 | 93.30 | 4.25 |
| AD-562257.1 | 101.31 | 9.81 | 97.55 | 15.36 | 95.26 | 7.79 |
| AD-560538.1 | 103.91 | 11.00 | 104.39 | 8.70 | 86.71 | 20.47 |
| AD-561579.1 | 87.65 | 10.59 | 80.92 | 11.54 | 83.54 | 7.48 |
| AD-562259.1 | 86.75 | 12.13 | 98.75 | 19.03 | 90.33 | 10.56 |
| AD-560968.1 | 94.61 | 7.70 | 107.14 | 4.84 | 88.97 | 10.45 |
| AD-561647.1 | 99.94 | 9.55 | 110.74 | 11.11 | 98.97 | 13.25 |
| AD-561469.1 | 84.71 | 4.50 | 88.17 | 6.08 | 82.50 | 8.92 |
| AD-561540.1 | 84.25 | 4.08 | 88.70 | 14.19 | 110.80 | 11.10 |
| AD-562135.1 | 89.38 | 4.70 | 95.02 | 2.81 | 98.61 | 12.79 |

### Example 3. In Vivo Screening of dsRNA Duplexes in Mice

[0745] Duplexes of interest, identified from the above in vitro studies, were evaluated in vivo.

[0746] In particular, 6-8-week old wild-type mice (C57BL/6) were administered 100 ml of a 2×10¹¹ viral particles/ml solution of an adeno-associated virus 8 (AAV8) vector encoding human complement factor B (hCFB AAV) by intravenous tail vein injection at Day −14.

[0747] At day 0, mice were subcutaneously administered a single 2 mg/kg dose of a duplex of interest or PBS control (n=3/group). Table 13 provides the duplexes that were administered to the mice.

[0748] At day 0, 7, and 14 post dose, blood was collected and plasma was prepared for ELISA assay. At day 14 post-dose, animals were sacrificed, liver samples were collected and snap-frozen in liquid nitrogen and tissue mRNA was extracted.

[0749] The level of human CFB protein was determined by quantitative sandwich enzyme immunoassay (AssayMax™, Human Complement Factor B ELISA Kit). Table 14 shows that the protein levels of human CFB were reduced upon treatment with a single dose of siRNA targeting hCFB at 2 mg/kg.

[0750] The level of human CFB expression was measured by RT-QPCR, as described above. Human CFB mRNA levels were compared to the mRNA level of the housekeeping gene GAPDH. The values were then normalized to the average of PBS vehicle control group. The data were expressed as percent of baseline value, and were presented as mean plus standard deviation. As shown in Table 15, human CFB mRNA levels were reduced upon treatment with a single dose of siRNA targeting hCFB at 2 mg/kg.

TABLE 13
dsRNA Duplexes for In Vivo Screening

| | | | | SEQ | Range in |
|---|---|---|---|---|---|
| Duplex ID | Oligo ID | Strand | Sequence 5′ to 3′ | ID NO: | NM_001710.5 |
| AD-558657.2 | A-1072067.1 | sense | gsusgaguGfaUfGfAfgaucucuuuuL96 | 629 | 643-665 |
| | A-1075535.1 | antis | asAfsaagAfgAfUfcucaUfcAfcucacsasu | 700 | |
| AD-559020.2 | A-1072793.1 | sense | asasaaguGfuCfUfAfgucaacuuauL96 | 619 | 1145-1167 |
| | A-1075898.1 | antis | asUfsaagUfuGfAfcuagAfcAfcuuuususg | 690 | |
| AD-559023.2 | A-1072799.1 | sense | asgsugucUfaGfUfCfaacuuaauuuL96 | 631 | 1148-1170 |
| | A-1075901.1 | antis | asAfsauuAfaGfUfugacUfaGfacacususu | 702 | |
| AD-558860.2 | A-1072473.1 | sense | usgsccaaGfaCfUfCfcuucauguauL96 | 591 | 928-950 |
| | A-1075738.1 | antis | asUfsacaUfgAfAfggagUfcUfuggcasgsg | 662 | |
| AD-560019.2 | A-1074791.1 | sense | asgsagaaGfuCfGfUfuucauucaauL96 | 593 | 2396-2418 |
| | A-1076897.1 | antis | asUfsugaAfuGfAfaacgAfcUfucucususg | 664 | |
| AD-560016.2 | A-1074785.1 | sense | ascsaagaGfaAfGfUfcguuucauuuL96 | 600 | 2393-2415 |
| | A-1076894.1 | antis | asAfsaugAfaAfCfgacuUfcUfcuugusgsa | 671 | |
| AD-559008.2 | A-1072769.1 | sense | uscsacagGfaGfCfCfaaaaaguguuL96 | 617 | 1133-1155 |
| | A-1075886.1 | antis | asAfscacUfuUfUfuggcUfcCfugugasasg | 688 | |
| AD-559717.2 | A-1074187.1 | sense | csasggaaUfuCfCfUfgaauuuuauuL96 | 660 | 1976-1998 |
| | A-1076595.1 | antis | asAfsuaaAfaUfUfcaggAfaUfuccugscsu | 731 | |
| AD-557072.2 | A-1072789.1 | sense | csasaaaaGfuGfUfCfuagucaacuuL96 | 191 | 1143-1165 |
| | A-1072790.1 | antis | asAfsguug(Agn)cuagacAfcUfuuuugsgsc | 277 | |
| AD-558097.2 | A-1074839.1 | sense | usasguggAfuGfUfCfugcaaaaacuL96 | 192 | 2438-2460 |
| | A-1074840.1 | antis | asGfsuuuu(Tgn)gcagacAfuCfcacuascsu | 278 | |
| AD-557774.2 | A-1074193.1 | sense | gsasauucCfuGfAfAfuuuuaugacuL96 | 193 | 1979-2001 |
| | A-1074194.1 | antis | asGfsucau(Agn)aaauucAfgGfaauucscsu | 279 | |
| AD-557070.2 | A-1072785.1 | sense | gscscaaaAfaGfUfGfucuagucaauL96 | 194 | 1141-1163 |
| | A-1072786.1 | antis | asUfsugac(Tgn)agacacUfuUfuuggcsusc | 280 | |
| AD-558065.2 | A-1074775.1 | sense | asgsuucaCfaAfGfAfgaagucguuuL96 | 199 | 2388-2410 |
| | A-1074776.1 | antis | asAfsacga(Cgn)uucucuUfgUfgaacusasu | 285 | |
| AD-557853.2 | A-1074351.1 | sense | asgsggaaCfaAfCfUfcgagcuuuguL96 | 208 | 2078-2100 |
| | A-1074352.1 | antis | asCfsaaag(Cgn)ucgaguUfgUfucccuscsg | 294 | |
| AD-557079.2 | A-1072803.1 | sense | usgsucuaGfuCfAfAfcuuaauugauL96 | 211 | 1150-1172 |
| | A-1072804.1 | antis | asUfscaau(Tgn)aaguugAfcUfagacascsu | 297 | |

TABLE 14
Human CFB siRNA In Vivo Screening

| | ELISA Results D7 | | ELISA Results D14 | |
|---|---|---|---|---|
| | Avg hCFB | | Avg hCFB | |
| | Protein | | Protein | |
| | Remaining | SD | Remaining | SD |
| PBS | 110.13 | 22.47 | 104.31 | 17.38 |
| Naïve | 96.75 | 21.00 | 92.31 | 6.54 |
| AD-558657.2 | 29.32 | 8.38 | 24.76 | 5.08 |
| AD-559020.2 | 24.26 | 4.07 | 25.05 | 1.22 |
| AD-559023.2 | 28.56 | 7.34 | 26.35 | 3.44 |
| AD-558860.2 | 52.69 | 4.25 | 50.31 | 17.27 |
| AD-560019.2 | 26.68 | 8.43 | 20.07 | 6.59 |
| AD-560016.2 | 44.06 | 2.59 | 45.94 | 2.69 |
| AD-559008.2 | 46.07 | 6.47 | 34.55 | 5.26 |
| AD-559717.2 | 57.72 | 11.41 | 51.14 | 13.28 |
| AD-557072.2 | 34.29 | 8.88 | 22.19 | 6.45 |
| AD-558097.2 | 31.01 | 9.59 | 29.55 | 10.60 |
| AD-557774.2 | 70.26 | 6.03 | 64.26 | 12.89 |
| AD-557070.2 | 91.58 | 21.23 | 71.11 | 18.76 |
| AD-558065.2 | 120.96 | 14.77 | 82.66 | 44.55 |
| AD-557853.2 | 94.22 | 24.50 | 81.47 | 18.23 |
| AD-557079.2 | 101.05 | 17.40 | 97.09 | 15.44 |

TABLE 15
Human CFB siRNA In Vivo Screening
qPCR Results D14

| | % message | |
|---|---|---|
| | remaining | SD |
| PBS | 100.19 | 7.12 |
| Naïve | 88.59 | 6.21 |
| AD-558657.2 | 37.82 | 11.34 |
| AD-559020.2 | 56.19 | 2.64 |
| AD-559023.2 | 37.50 | 3.28 |
| AD-558860.2 | 65.89 | 10.68 |
| AD-560019.2 | 22.01 | 1.70 |
| AD-560016.2 | 68.31 | 5.22 |
| AD-559008.2 | 53.91 | 12.03 |
| AD-559717.2 | 63.13 | 7.55 |
| AD-557072.2 | 39.39 | 1.21 |
| AD-558097.2 | 43.35 | 11.63 |
| AD-557774.2 | 81.10 | 4.79 |
| AD-557070.2 | 83.09 | 13.83 |
| AD-558065.2 | 86.18 | 9.28 |
| AD-557853.2 | 84.42 | 6.60 |
| AD-557079.2 | 98.00 | 15.34 |

### Example 4. In Vivo Screening of dsRNA Duplexes in Mice

[0751] Additional duplexes of interest, identified from the above in vitro studies, were evaluated in vivo.

[0752] In particular, 6-8-week old wild-type mice (C57BL/6) were administered 100 ml of a 2×10¹¹ viral particles/ml solution of an adeno-associated virus 8 (AAV8) vector encoding human complement factor B (hCFB AAV) by intravenous tail vein injection at Day −14.

[0753] At day 0, mice were subcutaneously administered a single 2 mg/kg dose of a duplex of interest or PBS control (n=3/group). Table 16 provides the duplexes that were administered to the mice.

[0754] At day 0, 7, and 14 post dose, blood was collected and plasma was prepared for ELISA assay. At day 14 post-dose, animals were sacrificed, liver samples were collected and snap-frozen in liquid nitrogen and tissue mRNA was extracted.

[0755] The level of human CFB protein was determined by quantitative sandwich enzyme immunoassay (AssayMax™, Human Complement Factor B ELISA Kit). Table 17 shows that the protein levels of human CFB were reduced upon treatment with a single dose of siRNA targeting hCFB at 2 mg/kg.

[0756] The level of human CFB expression was measured by RT-QPCR, as described above. Human CFB mRNA levels were compared to the mRNA level of the housekeeping gene GAPDH. The values were then normalized to the average of PBS vehicle control group. The data were expressed as percent of baseline value, and were presented as mean plus standard deviation. As shown in Table 18, human CFB mRNA levels were reduced upon treatment with a single dose of siRNA targeting hCFB at 2 mg/kg.

TABLE 16
dsRNA Duplexes for In Vivo Screening

| | | | | SEQ | Range in |
|---|---|---|---|---|---|
| DuplexID | OligoID | Strand | Sequence 5′ to 3′ | ID NO: | NM_001710.5 |
| AD-560018.2 | A-1074789.1 | sense | asasgagaAfgUfCfGfuuucauucauL96 | 592 | 2395-2417 |
| | A-1076896.1 | antis | asUfsgaaUfgAfAfacgaCfuUfcucuusgsu | 663 | |
| AD-559375.2 | A-1073503.1 | sense | asuscuggAfuGfUfCfuauguguuuuL96 | 658 | 1541-1563 |
| | A-1076253.1 | antis | asAfsaacAfcAfUfagacAfuCfcagausasa | 729 | |
| AD-559160.2 | A-1073073.1 | sense | usasugaaGfaCfCfAfcaaguugaauL96 | 594 | 1306-1328 |
| | A-1076038.1 | antis | asUfsucaAfcUfUfguggUfcUfucauasasu | 665 | |
| AD-559374.2 | A-1073501.1 | sense | usasucugGfaUfGfUfcuauguguuuL96 | 621 | 1540-1562 |
| | A-1076252.1 | antis | asAfsacaCfaUfAfgacaUfcCfagauasasu | 692 | |
| AD-559060.2 | A-1072873.1 | sense | usgsguguGfaAfGfCfcaagauauguL96 | 653 | 1185-1207 |
| | A-1075938.1 | antis | asCfsauaUfcUfUfggcuUfcAfcaccasusa | 724 | |
| AD-559721.2 | A-1074195.1 | sense | asasuuccUfgAfAfUfuuuaugacuuL96 | 650 | 1980-2002 |
| | A-1076599.1 | antis | asAfsgucAfuAfAfaauuCfaGfgaauuscsc | 721 | |
| AD-559026.2 | A-1072805.1 | sense | gsuscuagUfcAfAfCfuuaauugaguL96 | 651 | 1151-1173 |
| | A-1075904.1 | antis | asCfsucaAfuUfAfaguuGfaCfuagacsasc | 722 | |
| AD-558225.2 | A-1075095.1 | sense | usgsaauuAfaAfAfCfagcugcgacuL96 | 207 | 2602-2624 |
| | A-1075096.1 | antis | asGfsucgc(Agn)gcuguuUfuAfauucasasu | 293 | |
| AD-557069.2 | A-1072783.1 | sense | asgsccaaAfaAfGfUfgucuagucauL96 | 206 | 1140-1162 |
| | A-1072784.1 | antis | asUfsgacu(Agn)gacacuUfuUfuggcuscsc | 292 | |
| AD-558068.2 | A-1074781.1 | sense | uscsacaaGfaGfAfAfgucguuucauL96 | 195 | 2391-2413 |
| | A-1074782.1 | antis | asUfsgaaa(Cgn)gacuucUfcUfugugasasc | 281 | |
| AD-557422.2 | A-1073489.1 | sense | gsasggauUfaUfCfUfggaugucuauL96 | 202 | 1534-1556 |
| | A-1073490.1 | antis | asUfsagac(Agn)uccagaUfaAfuccucscsc | 288 | |
| AD-558063.2 | A-1074771.1 | sense | asusaguuCfaCfAfAfgagaagucguL96 | 205 | 2386-2408 |
| | A-1074772.1 | antis | asCfsgacu(Tgn)cucuugUfgAfacuauscsa | 291 | |
| AD-558066.2 | A-1074777.1 | sense | gsusucacAfaGfAfGfaagucguuuuL96 | 212 | 2389-2411 |
| | A-1074778.1 | antis | asAfsaacg(Agn)cuucucUfuGfugaacsusa | 298 | |
| AD-556701.2 | A-1072047.1 | sense | csusacuaCfaAfUfGfugagugauguL96 | 197 | 633-655 |
| | A-1072048.1 | antis | asCfsauca(Cgn)ucacauUfgUfaguagsgsg | 283 | |

TABLE 17
Human CFB siRNA In Vivo Screening

| | ELISA Results D7 | | ELISA Results D14 | |
|---|---|---|---|---|
| | Avg hCFB | | Avg hCFB | |
| | Protein | | Protein | |
| | Remaining | SD | Remaining | SD |
| PBS | 115.67 | 31.44 | 117.68 | 25.52 |
| Naïve | 110.11 | 4.46 | 108.16 | 15.25 |
| AD-560018.2 | 16.29 | 2.97 | 15.23 | 4.63 |
| AD-559375.2 | 42.43 | 8.09 | 44.31 | 14.32 |
| AD-559160.2 | 39.66 | 10.78 | 49.87 | 3.52 |
| AD-559374.2 | 43.88 | 10.14 | 41.19 | 9.12 |
| AD-559060.2 | 63.43 | 15.73 | 50.37 | 6.51 |
| AD-559721.2 | 30.89 | 2.80 | 28.32 | 5.76 |
| AD-559026.2 | 70.20 | 7.55 | 53.71 | 3.75 |
| AD-558225.2 | 42.06 | 1.30 | 41.12 | 6.52 |
| AD-557069.2 | 94.78 | 13.32 | 71.48 | 6.01 |
| AD-558068.2 | 94.83 | 9.22 | 97.31 | 20.15 |
| AD-557422.2 | 74.07 | 1.97 | 63.49 | 9.48 |
| AD-558063.2 | 77.64 | 3.66 | 81.77 | 4.84 |
| AD-558066.2 | 76.19 | 5.77 | 65.77 | 8.00 |
| AD-556701.2 | 69.44 | 3.28 | 62.51 | 21.07 |

TABLE 18
Human CFB siRNA In Vivo Screening
qPCR Results D14

| | % message | |
|---|---|---|
| | remaining | SD |
| PBS | 100.4 | 9.3 |
| Naïve | 77.4 | 13.2 |
| AD-560018.2 | 20.0 | 1.7 |
| AD-559375.2 | 66.4 | 10.1 |
| AD-559160.2 | 60.4 | 6.4 |
| AD-559374.2 | 38.3 | 12.3 |
| AD-559060.2 | 67.7 | 4.4 |
| AD-559721.2 | 38.6 | 7.2 |
| AD-559026.2 | 69.5 | 22.8 |
| AD-558225.2 | 58.7 | 12.7 |
| AD-557069.2 | 74.2 | 20.7 |
| AD-558068.2 | 56.4 | 18.2 |
| AD-557422.2 | 92.5 | 10.5 |
| AD-558063.2 | 91.9 | 26.6 |
| AD-558066.2 | 62.3 | 8.2 |
| AD-556701.2 | 58.4 | 3.2 |

### Example 5. Design and Synthesis of Additional dsRNA Duplexes

[0757] Additional siRNAs were designed, synthesized and annealed using methods known in the art and described above in Example 1.

[0758] Detailed lists of the additional unmodified CFB sense and antisense strand nucleotide sequences are shown in Table 19. Detailed lists of the modified CFB sense and antisense strand nucleotide sequences are shown in Table 20.

[0759] In vitro and in vivo single dose screens of these agents in HepG2 cells were performed as described in the Examples above. Briefly, HepG2 cells were transfected by adding 5 μl of Opti-MEM plus 0.25 μl of Lipofectamine RNAiMax per well (Invitrogen, Carlsbad CA. cat #13778-150) to 5 μl of each siRNA duplex to an individual well in a 96-well plate. The mixture was then incubated at room temperature for 15 minutes. Forty μl of Eagle's Minimum Essential Medium (ATCC Cat #30-2003) containing ˜2×10⁴ HepG2 cells were then added to the siRNA mixture. Cells were incubated for 24 hours prior to RNA purification. Single dose experiments were performed at 10 nM. The assays were performed as quadruplicates.

[0760] The results of the single dose screens of the dsRNA agents listed in Tables 19 and 20 in HepG2 cells are shown in Table 21. The results are presented as the mean percentage of message remaining.

TABLE 19
Unmodified Sense and Antisense Strand Sequences of Complement Factor B dsRNA Agents

| | | | | | Start | End | | |
|---|---|---|---|---|---|---|---|---|
| | | SEQ | | SEQ | site | site | | |
| Duplex | Sense | ID | Antiense | ID | in NM_ | in NM_ | | |
| Name | Sequence 5′ to 3′ | NO: | Sequence 5′ to 3′ | NO: | 001710.5 | 001710.5 | Region | Exon |
| AD-558312 | AAGGGAAUGUGACCAGGUCUU | 1029 | AAGACCUGGUCACAUUCCCUUCC | 1121 | 153 | 175 | 5′UTR | 1 |
| AD-558336 | CUGGAGUUUCAGCUUGGACAU | 43 | AUGUCCAAGCUGAAACUCCAGAC | 129 | 177 | 199 | 5′UTR | 1 |
| AD-558361 | CCAAGCAGACAAGCAAAGCAU | 1030 | AUGCUUUGCUUGUCUGCUUGGCU | 1122 | 202 | 224 | 5′UTR | 1 |
| AD-558382 | GCCAGGACACACCAUCCUGCU | 1031 | AGCAGGAUGGUGUGUCCUGGCUU | 1123 | 223 | 245 | 5′UTR | 1 |
| AD-558389 | CCAGCUUCUCUCCUGCCUUCU | 1032 | AGAAGGCAGGAGAGAAGCUGGGC | 1124 | 250 | 272 | 5′UTR | 1 |
| AD-558407 | UGCCUGAUGCCCUUUAUCUUU | 1033 | AAAGAUAAAGGGCAUCAGGCAGA | 1125 | 304 | 326 | CDS | 1 |
| AD-558426 | UGGGCCUCUUGUCUGGAGGUU | 1034 | AACCUCCAGACAAGAGGCCCAAG | 1126 | 323 | 345 | CDS | 1-2 |
| AD-558450 | CCACCACUCCAUGGUCUUUGU | 1035 | ACAAAGACCAUGGAGUGGUGGUC | 1127 | 347 | 369 | CDS | 2 |
| AD-558482 | UCCUUCCGACUUCUCCAAGAU | 1036 | AUCUUGGAGAAGUCGGAAGGAGC | 1128 | 418 | 440 | CDS | 2 |
| AD-558507 | AGGCACUGGAGUACGUGUGUU | 1037 | AACACACGUACUCCAGUGCCUGG | 1129 | 443 | 465 | CDS | 2 |
| AD-558522 | UGUGUCCUUCUGGCUUCUACU | 1038 | AGUAGAAGCCAGAAGGACACACG | 1130 | 458 | 480 | CDS | 2 |
| AD-558539 | UACCCGUACCCUGUGCAGACU | 1039 | AGUCUGCACAGGGUACGGGUAGA | 1131 | 475 | 497 | CDS | 2 |
| AD-558555 | AGACACGUACCUGCAGAUCUU | 1040 | AAGAUCUGCAGGUACGUGUCUGC | 1132 | 491 | 513 | CDS | 2 |
| AD-558579 | AGACUCAAGACCAAAAGACUU | 1041 | AAGUCUUUUGGUCUUGAGUCUUC | 1133 | 533 | 555 | CDS | 2 |
| AD-558612 | AGUGCAGAGCAAUCCACUGUU | 1042 | AACAGUGGAUUGCUCUGCACUCU | 1134 | 566 | 588 | CDS | 2-3 |
| AD-558637 | ACCACACGACUUCGAGAACGU | 1043 | ACGUUCUCGAAGUCGUGUGGUCU | 1135 | 591 | 613 | CDS | 3 |
| AD-558646 | CCUACUACAAUGUGAGUGAUU | 1044 | AAUCACUCACAUUGUAGUAGGGA | 1136 | 632 | 654 | CDS | 3 |
| AD-558662 | UGAUGAGAUCUCUUUCCACUU | 1045 | AAGUGGAAAGAGAUCUCAUCACU | 1137 | 648 | 670 | CDS | 3 |
| AD-558679 | ACUGCUAUGACGGUUACACUU | 52 | AAGUGUAACCGUCAUAGCAGUGG | 138 | 665 | 687 | CDS | 3 |
| AD-558701 | CACCUGCCAAGUGAAUGGCCU | 1046 | AGGCCAUUCACUUGGCAGGUGCG | 1138 | 705 | 727 | CDS | 3 |
| AD-558737 | AGCGAUCUGUGACAACGGAGU | 66 | ACUCCGUUGUCACAGAUCGCUGU | 1139 | 741 | 763 | CDS | 3-4 |
| AD-558747 | CAUUGGCACAAGGAAGGUGGU | 1047 | ACCACCUUCCUUGUGCCAAUGGG | 1140 | 789 | 811 | CDS | 4 |
| AD-558778 | CGCCUUGAAGACAGCGUCACU | 1048 | AGUGACGCUGUCUUCAAGGCGGU | 1141 | 820 | 842 | CDS | 4 |
| AD-558813 | GGCGAACGUGUCAGGAAGGUU | 1049 | AACCUUCCUGACACGUUCGCCGC | 1142 | 881 | 903 | CDS | 4 |
| AD-558859 | CUGCCAAGACUCCUUCAUGUU | 1050 | AACAUGAAGGAGUCUUGGCAGGA | 1143 | 927 | 949 | CDS | 4-5 |
| AD-558879 | GCCGAAGCUUUCCUGUCUUCU | 1051 | AGAAGACAGGAAAGCUUCGGCCA | 1144 | 967 | 989 | CDS | 5 |
| AD-558896 | UUCCCUGACAGAGACCAUAGU | 1052 | ACUAUGGUCUCUGUCAGGGAAGA | 1145 | 984 | 1006 | CDS | 5 |
| AD-558918 | GGAGUCGAUGCUGAGGAUGGU | 1053 | ACCAUCCUCAGCAUCGACUCCUU | 1146 | 1006 | 1028 | CDS | 5 |
| AD-558935 | CAACAGAAGCGGAAGAUCGUU | 1054 | AACGAUCUUCCGCUUCUGUUGUU | 1147 | 1042 | 1064 | CDS | 6 |
| AD-558965 | UCAGGCUCCAUGAACAUCUAU | 471 | AUAGAUGUUCAUGGAGCCUGAAG | 542 | 1072 | 1094 | CDS | 6 |
| AD-558993 | UAGAUGGAUCAGACAGCAUUU | 1055 | AAAUGCUGUCUGAUCCAUCUAGC | 1148 | 1100 | 1122 | CDS | 6 |
| AD-558998 | GCCAGCAACUUCACAGGAGCU | 1056 | AGCUCCUGUGAAGUUGCUGGCCC | 1149 | 1123 | 1145 | CDS | 6 |
| AD-559023 | AGUGUCUAGUCAACUUAAUUU | 489 | AAAUUAAGUUGACUAGACACUUU | 560 | 1148 | 1170 | CDS | 6 |
| AD-559040 | AUUGAGAAGGUGGCAAGUUAU | 1057 | AUAACUUGCCACCUUCUCAAUUA | 1150 | 1165 | 1187 | CDS | 6-7 |
| AD-559059 | AUGGUGUGAAGCCAAGAUAUU | 513 | AAUAUCUUGGCUUCACACCAUAA | 584 | 1184 | 1206 | CDS | 7 |
| AD-559074 | GAUAUGGUCUAGUGACAUAUU | 495 | AAUAUGUCACUAGACCAUAUCUU | 566 | 1199 | 1221 | CDS | 7 |
| AD-559089 | AUUUGGGUCAAAGUGUCUGAU | 1058 | AUCAGACACUUUGACCCAAAUUU | 1151 | 1234 | 1256 | CDS | 7 |
| AD-559112 | AGACAGCAGUAAUGCAGACUU | 1059 | AAGUCUGCAUUACUGCUGUCUGC | 1152 | 1257 | 1279 | CDS | 7 |
| AD-559143 | CAGCUCAAUGAAAUCAAUUAU | 478 | AUAAUUGAUUUCAUUGAGCUGCU | 549 | 1288 | 1310 | CDS | 7 |
| AD-559163 | GAAGACCACAAGUUGAAGUCU | 1060 | AGACUUCAACUUGUGGUCUUCAU | 1153 | 1309 | 1331 | CDS | 7-8 |
| AD-559184 | GGGACUAACACCAAGAAGGCU | 1061 | AGCCUUCUUGGUGUUAGUCCCUG | 1154 | 1330 | 1352 | CDS | 8 |
| AD-559208 | CAGGCAGUGUACAGCAUGAUU | 1062 | AAUCAUGCUGUACACUGCCUGGA | 1155 | 1354 | 1376 | CDS | 8 |
| AD-559233 | GGCCAGAUGACGUCCCUCCUU | 1063 | AAGGAGGGACGUCAUCUGGCCAG | 1156 | 1379 | 1401 | CDS | 8 |
| AD-559274 | UGUCAUCAUCCUCAUGACUGU | 1064 | ACAGUCAUGAGGAUGAUGACAUG | 1157 | 1422 | 1444 | CDS | 8 |
| AD-559290 | ACUGAUGGAUUGCACAACAUU | 1065 | AAUGUUGUGCAAUCCAUCAGUCA | 1158 | 1438 | 1460 | CDS | 8-9 |
| AD-559306 | UUACUGUCAUUGAUGAGAUCU | 1066 | AGAUCUCAUCAAUGACAGUAAUU | 1159 | 1472 | 1494 | CDS | 9 |
| AD-559329 | GACUUGCUAUACAUUGGCAAU | 1067 | AUUGCCAAUGUAUAGCAAGUCCC | 1160 | 1495 | 1517 | CDS | 9 |
| AD-559359 | AACCCAAGGGAGGAUUAUCUU | 486 | AAGAUAAUCCUCCCUUGGGUUUU | 557 | 1525 | 1547 | CDS | 9 |
| AD-559374 | UAUCUGGAUGUCUAUGUGUUU | 479 | AAACACAUAGACAUCCAGAUAAU | 550 | 1540 | 1562 | CDS | 9-10 |
| AD-559383 | GGGCCUUUGGUGAACCAAGUU | 1068 | AACUUGGUUCACCAAAGGCCCGA | 1161 | 1567 | 1589 | CDS | 10 |
| AD-559398 | CAAGUGAACAUCAAUGCUUUU | 491 | AAAAGCAUUGAUGUUCACUUGGU | 562 | 1582 | 1604 | CDS | 10 |
| AD-559421 | UUCCAAGAAAGACAAUGAGCU | 45 | AGCUCAUUGUCUUUCUUGGAAGC | 1162 | 1605 | 1627 | CDS | 10 |
| AD-559438 | AGCAACAUGUGUUCAAAGUCU | 1069 | AGACUUUGAACACAUGUUGCUCA | 1163 | 1622 | 1644 | CDS | 10 |
| AD-559455 | GUCAAGGAUAUGGAAAACCUU | 1070 | AAGGUUUUCCAUAUCCUUGACUU | 1164 | 1639 | 1661 | CDS | 10 |
| AD-559476 | GAAGAUGUUUUCUACCAAAUU | 1071 | AAUUUGGUAGAAAACAUCUUCCA | 1165 | 1660 | 1682 | CDS | 10 |
| AD-559497 | AUCGAUGAAAGCCAGUCUCUU | 1072 | AAGAGACUGGCUUUCAUCGAUCA | 1166 | 1681 | 1703 | CDS | 10-11 |
| AD-559512 | UCUCUGAGUCUCUGUGGCAUU | 1073 | AAUGCCACAGAGACUCAGAGACU | 1167 | 1696 | 1718 | CDS | 11 |
| AD-559536 | UGGGAACACAGGAAGGGUACU | 1074 | AGUACCCUUCCUGUGUUCCCAAA | 1168 | 1720 | 1742 | CDS | 11 |
| AD-559556 | CGAUUACCACAAGCAACCAUU | 1075 | AAUGGUUGCUUGUGGUAAUCGGU | 1169 | 1740 | 1762 | CDS | 11 |
| AD-559590 | UCAGUCAUUCGCCCUUCAAAU | 1076 | AUUUGAAGGGCGAAUGACUGAGA | 1170 | 1774 | 1796 | CDS | 11-12 |
| AD-559610 | GGGACACGAGAGCUGUAUGGU | 1077 | ACCAUACAGCUCUCGUGUCCCUU | 1171 | 1794 | 1816 | CDS | 12 |
| AD-559616 | GUGGUGUCUGAGUACUUUGUU | 482 | AACAAAGUACUCAGACACCACAG | 553 | 1819 | 1841 | CDS | 12 |
| AD-559641 | CAGCAGCACAUUGUUUCACUU | 1078 | AAGUGAAACAAUGUGCUGCUGUC | 1172 | 1844 | 1866 | CDS | 12 |
| AD-559670 | AAGGAACACUCAAUCAAGGUU | 1079 | AACCUUGAUUGAGUGUUCCUUGU | 1173 | 1873 | 1895 | CDS | 12 |
| AD-559704 | UAGAAGUAGUCCUAUUUCACU | 1080 | AGUGAAAUAGGACUACUUCUAUC | 1174 | 1925 | 1947 | CDS | 13 |
| AD-559706 | CAACUACAACAUUAAUGGGAU | 1081 | AUCCCAUUAAUGUUGUAGUUGGG | 1175 | 1947 | 1969 | CDS | 13 |
| AD-559722 | AUUCCUGAAUUUUAUGACUAU | 492 | AUAGUCAUAAAAUUCAGGAAUUC | 563 | 1981 | 2003 | CDS | 13 |
| AD-559740 | UAUGACGUUGCCCUGAUCAAU | 1082 | AUUGAUCAGGGCAACGUCAUAGU | 1176 | 1999 | 2021 | CDS | 13 |
| AD-559760 | GCUCAAGAAUAAGCUGAAAUU | 1083 | AAUUUCAGCUUAUUCUUGAGCUU | 1177 | 2019 | 2041 | CDS | 13 |
| AD-559788 | ACUAUCAGGCCCAUUUGUCUU | 466 | AAGACAAAUGGGCCUGAUAGUCU | 537 | 2047 | 2069 | CDS | 13-14 |
| AD-559799 | AGGGAACAACUCGAGCUUUGU | 36 | ACAAAGCUCGAGUUGUUCCCUCG | 122 | 2078 | 2100 | CDS | 14 |
| AD-559823 | UUCCUCCAACUACCACUUGCU | 1084 | AGCAAGUGGUAGUUGGAGGAAGC | 1178 | 2102 | 2124 | CDS | 14 |
| AD-559838 | CUUGCCAGCAACAAAAGGAAU | 1085 | AUUCCUUUUGUUGCUGGCAAGUG | 1179 | 2117 | 2139 | CDS | 14-15 |
| AD-559873 | CAGGAUAUCAAAGCUCUGUUU | 1086 | AAACAGAGCUUUGAUAUCCUGUG | 1180 | 2152 | 2174 | CDS | 15 |
| AD-559892 | UUGUGUCUGAGGAGGAGAAAU | 1087 | AUUUCUCCUCCUCAGACACAAAC | 1181 | 2171 | 2193 | CDS | 15 |
| AD-559926 | GGAGGUCUACAUCAAGAAUGU | 1088 | ACAUUCUUGAUGUAGACCUCCUU | 1182 | 2205 | 2227 | CDS | 15 |
| AD-559946 | GUGAGAGAGAUGCUCAAUAUU | 473 | AAUAUUGAGCAUCUCUCUCACAG | 544 | 2243 | 2265 | CDS | 16 |
| AD-559958 | GACAAAGUCAAGGACAUCUCU | 37 | AGAGAUGUCCUUGACUUUGUCAU | 123 | 2275 | 2297 | CDS | 16 |
| AD-559973 | UCGGUUCCUUUGUACUGGAGU | 1089 | ACUCCAGUACAAAGGAACCGAGG | 1183 | 2310 | 2332 | CDS | 16 |
| AD-559993 | GAGUGAGUCCCUAUGCUGACU | 1090 | AGUCAGCAUAGGGACUCACUCCU | 1184 | 2330 | 2352 | CDS | 16 |
| AD-559998 | UACUUGCAGAGGUGAUUCUGU | 1091 | ACAGAAUCACCUCUGCAAGUAUU | 1185 | 2355 | 2377 | CDS | 16-17 |
| AD-560011 | AGUUCACAAGAGAAGUCGUUU | 27 | AAACGACUUCUCUUGUGAACUAU | 113 | 2388 | 2410 | CDS | 17 |
| AD-560031 | UCAUUCAAGUUGGUGUAAUCU | 1092 | AGAUUACACCAACUUGAAUGAAA | 1186 | 2408 | 2430 | CDS | 17-18 |
| AD-560040 | GAGUAGUGGAUGUCUGCAAAU | 1093 | AUUUGCAGACAUCCACUACUCCC | 1187 | 2435 | 2457 | CDS | 18 |
| AD-560060 | AACCAGAAGCGGCAAAAGCAU | 1094 | AUGCUUUUGCCGCUUCUGGUUUU | 1188 | 2455 | 2477 | CDS | 18 |
| AD-560099 | GACUUUCACAUCAACCUCUUU | 1095 | AAAGAGGUUGAUGUGAAAGUCUC | 1189 | 2494 | 2516 | CDS | 18 |
| AD-560114 | CUCUUUCAAGUGCUGCCCUGU | 1096 | ACAGGGCAGCACUUGAAAGAGGU | 1190 | 2509 | 2531 | CDS | 18 |
| AD-560138 | AAGGAGAAACUCCAAGAUGAU | 1097 | AUCAUCUUGGAGUUUCUCCUUCA | 1191 | 2533 | 2555 | CDS | 18 |
| AD-560156 | GAGGAUUUGGGUUUUCUAUAU | 1098 | AUAUAGAAAACCCAAAUCCUCAU | 1192 | 2551 | 2573 | CDS | 18 |
| AD-560163 | CGUGGGAUUGAAUUAAAACAU | 506 | AUGUUUUAAUUCAAUCCCACGCC | 577 | 2594 | 2616 | 3′UTR | 18 |
| AD-558378 | GCAAGCCAGGACACACCAUCU | 1099 | AGAUGGUGUGUCCUGGCUUGCUU | 1193 | 219 | 241 | | |
| AD-558393 | CUUCUCUCCUGCCUUCCAACU | 1100 | AGUUGGAAGGCAGGAGAGAAGCU | 1194 | 254 | 276 | | |
| AD-558424 | CUUGGGCCUCUUGUCUGGAGU | 1101 | ACUCCAGACAAGAGGCCCAAGAU | 1195 | 321 | 343 | | |
| AD-558466 | AGAGAUCAAAGGCGGCUCCUU | 1102 | AAGGAGCCGCCUUUGAUCUCUAC | 1196 | 402 | 424 | | |
| AD-558511 | ACUGGAGUACGUGUGUCCUUU | 1103 | AAAGGACACACGUACUCCAGUGC | 1197 | 447 | 469 | | |
| AD-558574 | CCUGAAGACUCAAGACCAAAU | 1104 | AUUUGGUCUUGAGUCUUCAGGGU | 1198 | 528 | 550 | | |
| AD-558595 | GACUGUCAGGAAGGCAGAGUU | 1105 | AACUCUGCCUUCCUGACAGUCUU | 1199 | 549 | 571 | | |
| AD-558750 | UGGCACAAGGAAGGUGGGCAU | 1106 | AUGCCCACCUUCCUUGUGCCAAU | 1200 | 792 | 814 | | |
| AD-558777 | CCGCCUUGAAGACAGCGUCAU | 1107 | AUGACGCUGUCUUCAAGGCGGUA | 1201 | 819 | 841 | | |
| AD-559105 | CUGAAGCAGACAGCAGUAAUU | 1108 | AAUUACUGCUGUCUGCUUCAGAC | 1202 | 1250 | 1272 | | |
| AD-559124 | UGCAGACUGGGUCACGAAGCU | 1109 | AGCUUCGUGACCCAGUCUGCAUU | 1203 | 1269 | 1291 | | |
| AD-559189 | UAACACCAAGAAGGCCCUCCU | 1110 | AGGAGGGCCUUCUUGGUGUUAGU | 1204 | 1335 | 1357 | | |
| AD-559226 | AUGAGCUGGCCAGAUGACGUU | 1111 | AACGUCAUCUGGCCAGCUCAUCA | 1205 | 1372 | 1394 | | |
| AD-559330 | ACUUGCUAUACAUUGGCAAGU | 1112 | ACUUGCCAAUGUAUAGCAAGUCC | 1206 | 1496 | 1518 | | |
| AD-559486 | UCUACCAAAUGAUCGAUGAAU | 1113 | AUUCAUCGAUCAUUUGGUAGAAA | 1207 | 1670 | 1692 | | |
| AD-559532 | GGUUUGGGAACACAGGAAGGU | 1114 | ACCUUCCUGUGUUCCCAAACCAU | 1208 | 1716 | 1738 | | |
| AD-559573 | CAUGGCAGGCCAAGAUCUCAU | 1115 | AUGAGAUCUUGGCCUGCCAUGGU | 1209 | 1757 | 1779 | | |
| AD-559609 | AGGGACACGAGAGCUGUAUGU | 1116 | ACAUACAGCUCUCGUGUCCCUUU | 1210 | 1793 | 1815 | | |
| AD-559668 | ACAAGGAACACUCAAUCAAGU | 1117 | ACUUGAUUGAGUGUUCCUUGUCA | 1211 | 1871 | 1893 | | |
| AD-559688 | AAGCGGGACCUGGAGAUAGAU | 1118 | AUCUAUCUCCAGGUCCCGCUUCU | 1212 | 1909 | 1931 | | |
| AD-559882 | AAAGCUCUGUUUGUGUCUGAU | 1119 | AUCAGACACAAACAGAGCUUUGA | 1213 | 2161 | 2183 | | |
| AD-560123 | UGGCUGAAGGAGAAACUCCAU | 1120 | AUGGAGUUUCUCCUUCAGCCAGG | 1214 | 2527 | 2549 | | |

TABLE 20
Modified Sense and Antisense Strand Sequences of Complement Factor B dsRNA Agents

| | | SEQ | | SEQ | | SEQ |
|---|---|---|---|---|---|---|
| Duplex | | ID | Antisense | ID | | ID |
| Name | Sense Sequence 5′ to 3′ | NO: | Sequence 5′ to 3′ | NO: | mRNA Target Sequence | NO: |
| AD-558312 | asasgggaAfuGfUfGfaccaggucuuL96 | 1215 | asAfsgacCfuGfGfuc | 1307 | GGAAGGGAATGTGACCAGGTCTA | 1406 |
| | | | acAfuUfcccuuscsc | | | |
| AD-558336 | csusggagUfuUfCfAfgcuuggacauL96 | 215 | asUfsgucCfaAfGfcu | 1308 | GTCTGGAGTTTCAGCTTGGACAC | 1407 |
| | | | gaAfaCfuccagsasc | | | |
| AD-558361 | cscsaagcAfgAfCfAfagcaaagcauL96 | 1216 | asUfsgcuUfuGfCfuu | 1309 | AGCCAAGCAGACAAGCAAAGCAA | 1408 |
| | | | guCfuGfcuuggscsu | | | |
| AD-558382 | gscscaggAfcAfCfAfccauccugcuL96 | 1217 | asGfscagGfaUfGfgu | 1310 | AAGCCAGGACACACCATCCTGCC | 1409 |
| | | | guGfuCfcuggcsusu | | | |
| AD-558389 | cscsagcuUfcUfCfUfccugccuucuL96 | 1218 | asGfsaagGfcAfGfga | 1311 | GCCCAGCTTCTCTCCTGCCTTCC | 1410 |
| | | | gaGfaAfgcuggsgsc | | | |
| AD-558407 | usgsccugAfuGfCfCfcuuuaucuuuL96 | 1219 | asAfsagaUfaAfAfgg | 1312 | TCTGCCTGATGCCCTTTATCTTG | 1411 |
| | | | gcAfuCfaggcasgsa | | | |
| AD-558426 | usgsggccUfcUfUfGfucuggagguuL96 | 1220 | asAfsccuCfcAfGfac | 1313 | CTTGGGCCTCTTGTCTGGAGGTG | 1412 |
| | | | aaGfaGfgcccasasg | | | |
| AD-558450 | cscsaccaCfuCfCfAfuggucuuuguL96 | 1221 | asCfsaaaGfaCfCfau | 1314 | GACCACCACTCCATGGTCTTTGG | 1413 |
| | | | ggAfgUfgguggsusc | | | |
| AD-558482 | uscscuucCfgAfCfUfucuccaagauL96 | 1222 | asUfscuuGfgAfGfaa | 1315 | GCTCCTTCCGACTTCTCCAAGAG | 1414 |
| | | | guCfgGfaaggasgsc | | | |
| AD-558507 | asgsgcacUfgGfAfGfuacguguguuL96 | 1223 | asAfscacAfcGfUfac | 1316 | CCAGGCACTGGAGTACGTGTGTC | 1415 |
| | | | ucCfaGfugccusgsg | | | |
| AD-558522 | usgsugucCfuUfCfUfggcuucuacuL96 | 1224 | asGfsuagAfaGfCfca | 1317 | CGTGTGTCCTTCTGGCTTCTACC | 1416 |
| | | | gaAfgGfacacascsg | | | |
| AD-558539 | usascccgUfaCfCfCfugugcagacuL96 | 1225 | asGfsucuGfcAfCfag | 1318 | TCTACCCGTACCCTGTGCAGACA | 1417 |
| | | | ggUfaCfggguasgsa | | | |
| AD-558555 | asgsacacGfuAfCfCfugcagaucuuL96 | 1226 | asAfsgauCfuGfCfag | 1319 | GCAGACACGTACCTGCAGATCTA | 1418 |
| | | | guAfcGfugucusgsc | | | |
| AD-558579 | asgsacucAfaGfAfCfcaaaagacuuL96 | 1227 | asAfsgucUfuUfUfgg | 1320 | GAAGACTCAAGACCAAAAGACTG | 1419 |
| | | | ucUfuGfagucususc | | | |
| AD-558612 | asgsugcaGfaGfCfAfauccacuguuL96 | 1228 | asAfscagUfgGfAfuu | 1321 | AGAGTGCAGAGCAATCCACTGTC | 1420 |
| | | | gcUfcUfgcacuscsu | | | |
| AD-558637 | ascscacaCfgAfCfUfucgagaacguL96 | 1229 | asCfsguuCfuCfGfaa | 1322 | AGACCACACGACTTCGAGAACGG | 1421 |
| | | | guCfgUfgugguscsu | | | |
| AD-558646 | cscsuacuAfcAfAfUfgugagugauuL96 | 1230 | asAfsucaCfuCfAfca | 1323 | TCCCTACTACAATGTGAGTGATG | 1422 |
| | | | uuGfuAfguaggsgsa | | | |
| AD-558662 | usgsaugaGfaUfCfUfcuuuccacuuL96 | 1231 | asAfsgugGfaAfAfga | 1324 | AGTGATGAGATCTCTTTCCACTG | 1423 |
| | | | gaUfcUfcaucascsu | | | |
| AD-558679 | ascsugcuAfuGfAfCfgguuacacuuL96 | 224 | asAfsgugUfaAfCfcg | 1325 | CCACTGCTATGACGGTTACACTC | 1424 |
| | | | ucAfuAfgcagusgsg | | | |
| AD-558701 | csasccugCfcAfAfGfugaauggccuL96 | 1232 | asGfsgccAfuUfCfac | 1326 | CGCACCTGCCAAGTGAATGGCCG | 1425 |
| | | | uuGfgCfaggugscsg | | | |
| AD-558737 | asgscgauCfuGfUfGfacaacggaguL96 | 238 | asCfsuccGfuUfGfuc | 1327 | ACAGCGATCTGTGACAACGGAGC | 1426 |
| | | | acAfgAfucgcusgsu | | | |
| AD-558747 | csasuuggCfaCfAfAfggaaggugguL96 | 1233 | asCfscacCfuUfCfcu | 1328 | CCCATTGGCACAAGGAAGGTGGG | 1427 |
| | | | ugUfgCfcaaugsgsg | | | |
| AD-558778 | csgsccuuGfaAfGfAfcagcgucacuL96 | 1234 | asGfsugaCfgCfUfgu | 1329 | ACCGCCTTGAAGACAGCGTCACC | 1428 |
| | | | cuUfcAfaggcgsgsu | | | |
| AD-558813 | gsgscgaaCfgUfGfUfcaggaagguuL96 | 1235 | asAfsccuUfcCfUfga | 1330 | GCGGCGAACGTGTCAGGAAGGTG | 1429 |
| | | | caCfgUfucgccsgsc | | | |
| AD-558859 | csusgccaAfgAfCfUfccuucauguuL96 | 1236 | asAfscauGfaAfGfga | 1331 | TCCTGCCAAGACTCCTTCATGTA | 1430 |
| | | | guCfuUfggcagsgsa | | | |
| AD-558879 | gscscgaaGfcUfUfUfccugucuucuL96 | 1237 | asGfsaagAfcAfGfga | 1332 | TGGCCGAAGCTTTCCTGTCTTCC | 1431 |
| | | | aaGfcUfucggcscsa | | | |
| AD-558896 | ususcccuGfaCfAfGfagaccauaguL96 | 1238 | asCfsuauGfgUfCfuc | 1333 | TCTTCCCTGACAGAGACCATAGA | 1432 |
| | | | ugUfcAfgggaasgsa | | | |
| AD-558918 | gsgsagucGfaUfGfCfugaggaugguL96 | 1239 | asCfscauCfcUfCfag | 1334 | AAGGAGTCGATGCTGAGGATGGG | 1433 |
| | | | caUfcGfacuccsusu | | | |
| AD-558935 | csasacagAfaGfCfGfgaagaucguuL96 | 1240 | asAfscgaUfcUfUfcc | 1335 | AACAACAGAAGCGGAAGATCGTC | 1434 |
| | | | gcUfuCfuguugsusu | | | |
| AD-558965 | uscsaggcUfcCfAfUfgaacaucuauL96 | 613 | asUfsagaUfgUfUfca | 684 | CTTCAGGCTCCATGAACATCTAC | 1435 |
| | | | ugGfaGfccugasasg | | | |
| AD-558993 | usasgaugGfaUfCfAfgacagcauuuL96 | 1241 | asAfsaugCfuGfUfcu | 1336 | GCTAGATGGATCAGACAGCATTG | 1436 |
| | | | gaUfcCfaucuasgsc | | | |
| AD-558998 | gscscagcAfaCfUfUfcacaggagcuL96 | 1242 | asGfscucCfuGfUfga | 1337 | GGGCCAGCAACTTCACAGGAGCC | 1437 |
| | | | agUfuGfcuggcscsc | | | |
| AD-559023 | asgsugucUfaGfUfCfaacuuaauuuL96 | 631 | asAfsauuAfaGfUfug | 702 | AAAGTGTCTAGTCAACTTAATTG | 1438 |
| | | | acUfaGfacacususu | | | |
| AD-559040 | asusugagAfaGfGfUfggcaaguuauL96 | 1243 | asUfsaacUfuGfCfca | 1338 | TAATTGAGAAGGTGGCAAGTTAT | 1439 |
| | | | ccUfuCfucaaususa | | | |
| AD-559059 | asusggugUfgAfAfGfccaagauauuL96 | 655 | asAfsuauCfuUfGfgc | 726 | TTATGGTGTGAAGCCAAGATATG | 1440 |
| | | | uuCfaCfaccausasa | | | |
| AD-559074 | gsasuaugGfuCfUfAfgugacauauuL96 | 637 | asAfsuauGfuCfAfcu | 708 | AAGATATGGTCTAGTGACATATG | 1441 |
| | | | agAfcCfauaucsusu | | | |
| AD-559089 | asusuuggGfuCfAfAfagugucugauL96 | 1244 | asUfscagAfcAfCfuu | 1339 | AAATTTGGGTCAAAGTGTCTGAA | 1442 |
| | | | ugAfcCfcaaaususu | | | |
| AD-559112 | asgsacagCfaGfUfAfaugcagacuuL96 | 1245 | asAfsgucUfgCfAfuu | 1340 | GCAGACAGCAGTAATGCAGACTG | 1443 |
| | | | acUfgCfugucusgsc | | | |
| AD-559143 | csasgcucAfaUfGfAfaaucaauuauL96 | 620 | asUfsaauUfgAfUfuu | 691 | AGCAGCTCAATGAAATCAATTAT | 1444 |
| | | | caUfuGfagcugscsu | | | |
| AD-559163 | gsasagacCfaCfAfAfguugaagucuL96 | 1246 | asGfsacuUfcAfAfcu | 1341 | ATGAAGACCACAAGTTGAAGTCA | 1445 |
| | | | ugUfgGfucuucsasu | | | |
| AD-559184 | gsgsgacuAfaCfAfCfcaagaaggcuL96 | 1247 | asGfsccuUfcUfUfgg | 1342 | CAGGGACTAACACCAAGAAGGCC | 1446 |
| | | | ugUfuAfgucccsusg | | | |
| AD-559208 | csasggcaGfuGfUfAfcagcaugauuL96 | 1248 | asAfsucaUfgCfUfgu | 1343 | TCCAGGCAGTGTACAGCATGATG | 1447 |
| | | | acAfcUfgccugsgsa | | | |
| AD-559233 | gsgsccagAfuGfAfCfgucccuccuuL96 | 1249 | asAfsggaGfgGfAfcg | 1344 | CTGGCCAGATGACGTCCCTCCTG | 1448 |
| | | | ucAfuCfuggccsasg | | | |
| AD-559274 | usgsucauCfaUfCfCfucaugacuguL96 | 1250 | asCfsaguCfaUfGfag | 1345 | CATGTCATCATCCTCATGACTGA | 1449 |
| | | | gaUfgAfugacasusg | | | |
| AD-559290 | ascsugauGfgAfUfUfgcacaacauuL96 | 1251 | asAfsuguUfgUfGfca | 1346 | TGACTGATGGATTGCACAACATG | 1450 |
| | | | auCfcAfucaguscsa | | | |
| AD-559306 | ususacugUfcAfUfUfgaugagaucuL96 | 1252 | asGfsaucUfcAfUfca | 1347 | AATTACTGTCATTGATGAGATCC | 1451 |
| | | | auGfaCfaguaasusu | | | |
| AD-559329 | gsascuugCfuAfUfAfcauuggcaauL96 | 1253 | asUfsugcCfaAfUfgu | 1348 | GGGACTTGCTATACATTGGCAAG | 1452 |
| | | | auAfgCfaagucscsc | | | |
| AD-559359 | asascccaAfgGfGfAfggauuaucuuL96 | 628 | asAfsgauAfaUfCfcu | 699 | AAAACCCAAGGGAGGATTATCTG | 1453 |
| | | | ccCfuUfggguususu | | | |
| AD-559374 | usasucugGfaUfGfUfcuauguguuuL96 | 621 | asAfsacaCfaUfAfga | 692 | ATTATCTGGATGTCTATGTGTTT | 1454 |
| | | | caUfcCfagauasasu | | | |
| AD-559383 | gsgsgccuUfuGfGfUfgaaccaaguuL96 | 1254 | asAfscuuGfgUfUfca | 1349 | TCGGGCCTTTGGTGAACCAAGTG | 1455 |
| | | | ccAfaAfggcccsgsa | | | |
| AD-559398 | csasagugAfaCfAfUfcaaugcuuuuL96 | 633 | asAfsaagCfaUfUfga | 704 | ACCAAGTGAACATCAATGCTTTG | 1456 |
| | | | ugUfuCfacuugsgsu | | | |
| AD-559421 | ususccaaGfaAfAfGfacaaugagcuL96 | 217 | asGfscucAfuUfGfuc | 1350 | GCTTCCAAGAAAGACAATGAGCA | 1457 |
| | | | uuUfcUfuggaasgsc | | | |
| AD-559438 | asgscaacAfuGfUfGfuucaaagucuL96 | 1255 | asGfsacuUfuGfAfac | 1351 | TGAGCAACATGTGTTCAAAGTCA | 1458 |
| | | | acAfuGfuugcuscsa | | | |
| AD-559455 | gsuscaagGfaUfAfUfggaaaaccuuL96 | 1256 | asAfsgguUfuUfCfca | 1352 | AAGTCAAGGATATGGAAAACCTG | 1459 |
| | | | uaUfcCfuugacsusu | | | |
| AD-559476 | gsasagauGfuUfUfUfcuaccaaauuL96 | 1257 | asAfsuuuGfgUfAfga | 1353 | TGGAAGATGTTTTCTACCAAATG | 1460 |
| | | | aaAfcAfucuucscsa | | | |
| AD-559497 | asuscgauGfaAfAfGfccagucucuuL96 | 1258 | asAfsgagAfcUfGfgc | 1354 | TGATCGATGAAAGCCAGTCTCTG | 1461 |
| | | | uuUfcAfucgauscsa | | | |
| AD-559512 | uscsucugAfgUfCfUfcuguggcauuL96 | 1259 | asAfsugcCfaCfAfga | 1355 | AGTCTCTGAGTCTCTGTGGCATG | 1462 |
| | | | gaCfuCfagagascsu | | | |
| AD-559536 | usgsggaaCfaCfAfGfgaaggguacuL96 | 1260 | asGfsuacCfcUfUfcc | 1356 | TTTGGGAACACAGGAAGGGTACC | 1463 |
| | | | ugUfgUfucccasasa | | | |
| AD-559556 | csgsauuaCfcAfCfAfagcaaccauuL96 | 1261 | asAfsuggUfuGfCfuu | 1357 | ACCGATTACCACAAGCAACCATG | 1464 |
| | | | guGfgUfaaucgsgsu | | | |
| AD-559590 | uscsagucAfuUfCfGfcccuucaaauL96 | 1262 | asUfsuugAfaGfGfgc | 1358 | TCTCAGTCATTCGCCCTTCAAAG | 1465 |
| | | | gaAfuGfacugasgsa | | | |
| AD-559610 | gsgsgacaCfgAfGfAfgcuguaugguL96 | 1263 | asCfscauAfcAfGfcu | 1359 | AAGGGACACGAGAGCTGTATGGG | 1466 |
| | | | cuCfgUfgucccsusu | | | |
| AD-559616 | gsusggugUfcUfGfAfguacuuuguuL96 | 624 | asAfscaaAfgUfAfcu | 695 | CTGTGGTGTCTGAGTACTTTGTG | 1467 |
| | | | caGfaCfaccacsasg | | | |
| AD-559641 | csasgcagCfaCfAfUfuguuucacuuL96 | 1264 | asAfsgugAfaAfCfaa | 1360 | GACAGCAGCACATTGTTTCACTG | 1468 |
| | | | ugUfgCfugcugsusc | | | |
| AD-559670 | asasggaaCfaCfUfCfaaucaagguuL96 | 1265 | asAfsccuUfgAfUfug | 1361 | ACAAGGAACACTCAATCAAGGTC | 1469 |
| | | | agUfgUfuccuusgsu | | | |
| AD-559704 | usasgaagUfaGfUfCfcuauuucacuL96 | 1266 | asGfsugaAfaUfAfgg | 1362 | GATAGAAGTAGTCCTATTTCACC | 1470 |
| | | | acUfaCfuucuasusc | | | |
| AD-559706 | csasacuaCfaAfCfAfuuaaugggauL96 | 1267 | asUfscccAfuUfAfau | 1363 | CCCAACTACAACATTAATGGGAA | 1471 |
| | | | guUfgUfaguugsgsg | | | |
| AD-559722 | asusuccuGfaAfUfUfuuaugacuauL96 | 634 | asUfsaguCfaUfAfaa | 705 | GAATTCCTGAATTTTATGACTAT | 1472 |
| | | | auUfcAfggaaususc | | | |
| AD-559740 | usasugacGfuUfGfCfccugaucaauL96 | 1268 | asUfsugaUfcAfGfgg | 1364 | ACTATGACGTTGCCCTGATCAAG | 1473 |
| | | | caAfcGfucauasgsu | | | |
| AD-559760 | gscsucaaGfaAfUfAfagcugaaauuL96 | 1269 | asAfsuuuCfaGfCfuu | 1365 | AAGCTCAAGAATAAGCTGAAATA | 1474 |
| | | | auUfcUfugagcsusu | | | |
| AD-559788 | ascsuaucAfgGfCfCfcauuugucuuL96 | 608 | asAfsgacAfaAfUfgg | 679 | AGACTATCAGGCCCATTTGTCTC | 1475 |
| | | | gcCfuGfauaguscsu | | | |
| AD-559799 | asgsggaaCfaAfCfUfcgagcuuuguL96 | 208 | asCfsaaaGfcUfCfga | 1366 | CGAGGGAACAACTCGAGCTTTGA | 1476 |
| | | | guUfgUfucccuscsg | | | |
| AD-559823 | ususccucCfaAfCfUfaccacuugcuL96 | 1270 | asGfscaaGfuGfGfua | 1367 | GCTTCCTCCAACTACCACTTGCC | 1477 |
| | | | guUfgGfaggaasgsc | | | |
| AD-559838 | csusugccAfgCfAfAfcaaaaggaauL96 | 1271 | asUfsuccUfuUfUfgu | 1368 | CACTTGCCAGCAACAAAAGGAAG | 1478 |
| | | | ugCfuGfgcaagsusg | | | |
| AD-559873 | csasggauAfuCfAfAfagcucuguuuL96 | 1272 | asAfsacaGfaGfCfuu | 1369 | CACAGGATATCAAAGCTCTGTTT | 1479 |
| | | | ugAfuAfuccugsusg | | | |
| AD-559892 | ususguguCfuGfAfGfgaggagaaauL96 | 1273 | asUfsuucUfcCfUfcc | 1370 | GTTTGTGTCTGAGGAGGAGAAAA | 1480 |
| | | | ucAfgAfcacaasasc | | | |
| AD-559926 | gsgsagguCfuAfCfAfucaagaauguL96 | 1274 | asCfsauuCfuUfGfau | 1371 | AAGGAGGTCTACATCAAGAATGG | 1481 |
| | | | guAfgAfccuccsusu | | | |
| AD-559946 | gsusgagaGfaGfAfUfgcucaauauuL96 | 615 | asAfsuauUfgAfGfca | 686 | CTGTGAGAGAGATGCTCAATATG | 1482 |
| | | | ucUfcUfcucacsasg | | | |
| AD-559958 | gsascaaaGfuCfAfAfggacaucucuL96 | 209 | asGfsagaUfgUfCfcu | 1372 | ATGACAAAGTCAAGGACATCTCA | 1483 |
| | | | ugAfcUfuugucsasu | | | |
| AD-559973 | uscsgguuCfcUfUfUfguacuggaguL96 | 1275 | asCfsuccAfgUfAfca | 1373 | CCTCGGTTCCTTTGTACTGGAGG | 1484 |
| | | | aaGfgAfaccgasgsg | | | |
| AD-559993 | gsasgugaGfuCfCfCfuaugcugacuL96 | 1276 | asGfsucaGfcAfUfag | 1374 | AGGAGTGAGTCCCTATGCTGACC | 1485 |
| | | | ggAfcUfcacucscsu | | | |
| AD-559998 | usascuugCfaGfAfGfgugauucuguL96 | 1277 | asCfsagaAfuCfAfcc | 1375 | AATACTTGCAGAGGTGATTCTGG | 1486 |
| | | | ucUfgCfaaguasusu | | | |
| AD-560011 | asgsuucaCfaAfGfAfgaagucguuuL96 | 199 | asAfsacgAfcUfUfcu | 1376 | ATAGTTCACAAGAGAAGTCGTTT | 1487 |
| | | | cuUfgUfgaacusasu | | | |
| AD-560031 | uscsauucAfaGfUfUfgguguaaucuL96 | 1278 | asGfsauuAfcAfCfca | 1377 | TTTCATTCAAGTTGGTGTAATCA | 1488 |
| | | | acUfuGfaaugasasa | | | |
| AD-560040 | gsasguagUfgGfAfUfgucugcaaauL96 | 1279 | asUfsuugCfaGfAfca | 1378 | GGGAGTAGTGGATGTCTGCAAAA | 1489 |
| | | | ucCfaCfuacucscsc | | | |
| AD-560060 | asasccagAfaGfCfGfgcaaaagcauL96 | 1280 | asUfsgcuUfuUfGfcc | 1379 | AAAACCAGAAGCGGCAAAAGCAG | 1490 |
| | | | gcUfuCfugguususu | | | |
| AD-560099 | gsascuuuCfaCfAfUfcaaccucuuuL96 | 1281 | asAfsagaGfgUfUfga | 1380 | GAGACTTTCACATCAACCTCTTT | 1491 |
| | | | ugUfgAfaagucsusc | | | |
| AD-560114 | csuscuuuCfaAfGfUfgcugcccuguL96 | 1282 | asCfsaggGfcAfGfca | 1381 | ACCTCTTTCAAGTGCTGCCCTGG | 1492 |
| | | | cuUfgAfaagagsgsu | | | |
| AD-560138 | asasggagAfaAfCfUfccaagaugauL96 | 1283 | asUfscauCfuUfGfga | 1382 | TGAAGGAGAAACTCCAAGATGAG | 1493 |
| | | | guUfuCfuccuuscsa | | | |
| AD-560156 | gsasggauUfuGfGfGfuuuucuauauL96 | 1284 | asUfsauaGfaAfAfac | 1383 | ATGAGGATTTGGGTTTTCTATAA | 1494 |
| | | | ccAfaAfuccucsasu | | | |
| AD-560163 | csgsugggAfuUfGfAfauuaaaacauL96 | 648 | asUfsguuUfuAfAfuu | 719 | GGCGTGGGATTGAATTAAAACAG | 1495 |
| | | | caAfuCfccacgscsc | | | |
| AD-558378 | gscsaagcCfaGfGfAfcacaccaucuL96 | 1285 | asGfsaugGfuGfUfgu | 1384 | AAGCAAGCCAGGACACACCAUCC | 1496 |
| | | | ccUfgGfcuugcsusu | | | |
| AD-558393 | csusucucUfcCfUfGfccuuccaacuL96 | 1286 | asGfsuugGfaAfGfgc | 1385 | AGCUUCUCUCCUGCCUUCCAACG | 1497 |
| | | | agGfaGfagaagscsu | | | |
| AD-558424 | csusugggCfcUfCfUfugucuggaguL96 | 1287 | asCfsuccAfgAfCfaa | 1386 | AUCUUGGGCCUCUUGUCUGGAGG | 1498 |
| | | | gaGfgCfccaagsasu | | | |
| AD-558466 | asgsagauCfaAfAfGfgcggcuccuuL96 | 1288 | asAfsggaGfcCfGfcc | 1387 | GUAGAGAUCAAAGGCGGCUCCUU | 1499 |
| | | | uuUfgAfucucusasc | | | |
| AD-558511 | ascsuggaGfuAfCfGfuguguccuuuL96 | 1289 | asAfsaggAfcAfCfac | 1388 | GCACUGGAGUACGUGUGUCCUUC | 1500 |
| | | | guAfcUfccagusgsc | | | |
| AD-558574 | cscsugaaGfaCfUfCfaagaccaaauL96 | 1290 | asUfsuugGfuCfUfug | 1389 | ACCCUGAAGACUCAAGACCAAAA | 1501 |
| | | | agUfcUfucaggsgsu | | | |
| AD-558595 | gsascuguCfaGfGfAfaggcagaguuL96 | 1291 | asAfscucUfgCfCfuu | 1390 | AAGACUGUCAGGAAGGCAGAGUG | 1502 |
| | | | ccUfgAfcagucsusu | | | |
| AD-558750 | usgsgcacAfaGfGfAfaggugggcauL96 | 1292 | asUfsgccCfaCfCfuu | 1391 | AUUGGCACAAGGAAGGUGGGCAG | 1503 |
| | | | ccUfuGfugccasasu | | | |
| AD-558777 | cscsgccuUfgAfAfGfacagcgucauL96 | 1293 | asUfsgacGfcUfGfuc | 1392 | UACCGCCUUGAAGACAGCGUCAC | 1504 |
| | | | uuCfaAfggcggsusa | | | |
| AD-559105 | csusgaagCfaGfAfCfagcaguaauuL96 | 1294 | asAfsuuaCfuGfCfug | 1393 | GUCUGAAGCAGACAGCAGUAAUG | 1505 |
| | | | ucUfgCfuucagsasc | | | |
| AD-559124 | usgscagaCfuGfGfGfucacgaagcuL96 | 1295 | asGfscuuCfgUfGfac | 1394 | AAUGCAGACUGGGUCACGAAGCA | 1506 |
| | | | ccAfgUfcugcasusu | | | |
| AD-559189 | usasacacCfaAfGfAfaggcccuccuL96 | 1296 | asGfsgagGfgCfCfuu | 1395 | ACUAACACCAAGAAGGCCCUCCA | 1507 |
| | | | cuUfgGfuguuasgsu | | | |
| AD-559226 | asusgagcUfgGfCfCfagaugacguuL96 | 1297 | asAfscguCfaUfCfug | 1396 | UGAUGAGCUGGCCAGAUGACGUC | 1508 |
| | | | gcCfaGfcucauscsa | | | |
| AD-559330 | ascsuugcUfaUfAfCfauuggcaaguL96 | 1298 | asCfsuugCfcAfAfug | 1397 | GGACUUGCUAUACAUUGGCAAGG | 1509 |
| | | | uaUfaGfcaaguscsc | | | |
| AD-559486 | uscsuaccAfaAfUfGfaucgaugaauL96 | 1299 | asUfsucaUfcGfAfuc | 1398 | UUUCUACCAAAUGAUCGAUGAAA | 1510 |
| | | | auUfuGfguagasasa | | | |
| AD-559532 | gsgsuuugGfgAfAfCfacaggaagguL96 | 1300 | asCfscuuCfcUfGfug | 1399 | AUGGUUUGGGAACACAGGAAGGG | 1511 |
| | | | uuCfcCfaaaccsasu | | | |
| AD-559573 | csasuggcAfgGfCfCfaagaucucauL96 | 1301 | asUfsgagAfuCfUfug | 1400 | ACCAUGGCAGGCCAAGAUCUCAG | 1512 |
| | | | gcCfuGfccaugsgsu | | | |
| AD-559609 | asgsggacAfcGfAfGfagcuguauguL96 | 1302 | asCfsauaCfaGfCfuc | 1401 | AAAGGGACACGAGAGCUGUAUGG | 1513 |
| | | | ucGfuGfucccususu | | | |
| AD-559668 | ascsaaggAfaCfAfCfucaaucaaguL96 | 1303 | asCfsuugAfuUfGfag | 1402 | UGACAAGGAACACUCAAUCAAGG | 1514 |
| | | | ugUfuCfcuuguscsa | | | |
| AD-559688 | asasgcggGfaCfCfUfggagauagauL96 | 1304 | asUfscuaUfcUfCfca | 1403 | AGAAGCGGGACCUGGAGAUAGAA | 1515 |
| | | | ggUfcCfcgcuuscsu | | | |
| AD-559882 | asasagcuCfuGfUfUfugugucugauL96 | 1305 | asUfscagAfcAfCfaa | 1404 | UCAAAGCUCUGUUUGUGUCUGAG | 1516 |
| | | | acAfgAfgcuuusgsa | | | |

TABLE 21
In Vitro Single Dose Screen in HepG2 cells

| | CFB/gapdh | | |
|---|---|---|---|
| | 10 nM | | |
| | % average | | |
| | message | | Target region in |
| Duplex Name | remaining | SD | NM_001710.5 |
| AD-560132.1 | 9.927 | 1.092 | 2527-2549 |
| AD-560099.1 | 9.213 | 1.335 | 2494-2516 |
| AD-559998.1 | 11.297 | 1.165 | 2355-2377 |
| AD-559993.1 | 11.852 | 1.080 | 2330-2352 |
| AD-559973.1 | 53.866 | 5.431 | 2310-2332 |
| AD-559882.1 | 10.290 | 1.623 | 2161-2183 |
| AD-559706.1 | 11.537 | 1.805 | 1947-1969 |
| AD-559704.1 | 15.239 | 3.563 | 1924-1947 |
| AD-559688.1 | 38.443 | 9.924 | 1909-1931 |
| AD-559668.1 | 10.169 | 0.593 | 1871-1893 |
| AD-559641.1 | 29.195 | 3.820 | 1844-1866 |
| AD-559609.1 | 88.678 | 6.099 | 1793-1815 |
| AD-559590.1 | 35.152 | 4.022 | 1774-1796 |
| AD-559573.1 | 38.212 | 6.701 | 1757-1779 |
| AD-559532.1 | 74.766 | 13.877 | 1716-1738 |
| AD-559486.1 | 24.644 | 9.120 | 1670-1692 |
| AD-559330.1 | 95.265 | 4.050 | 1496-1518 |
| AD-559274.1 | 13.751 | 2.733 | 1422-1444 |
| AD-559226.1 | 102.524 | 5.658 | 1372-1394 |
| AD-559208.1 | 16.066 | 2.069 | 1354-1376 |
| AD-559189.1 | 16.100 | 2.031 | 1335-1357 |
| AD-559124.1 | 15.423 | 2.069 | 1269-1291 |
| AD-559105.1 | 9.673 | 1.193 | 1250-1272 |
| AD-559089.1 | 10.663 | 2.329 | 1234-1256 |
| AD-558935.1 | 13.757 | 1.222 | 1042-1064 |
| AD-558879.1 | 14.752 | 3.406 | 967-989 |
| AD-558777.1 | 14.623 | 2.074 | 819-841 |
| AD-558750.1 | 16.390 | 2.306 | 792-814 |
| AD-558637.1 | 24.702 | 7.767 | 591-613 |
| AD-558612.1 | 12.506 | 1.594 | 566-588 |
| AD-558595.1 | 11.413 | 1.630 | 549-571 |
| AD-558574.1 | 12.253 | 1.051 | 528-550 |
| AD-558555.1 | 12.550 | 1.821 | 491-513 |
| AD-558511.1 | 10.434 | 4.050 | 447-469 |
| AD-558482.1 | 47.746 | 10.594 | 418-440 |
| AD-558466.1 | 17.794 | 3.389 | 402-424 |
| AD-558450.1 | 11.521 | 2.865 | 347-369 |
| AD-558424.1 | 23.751 | 5.256 | 321-343 |
| AD-558407.1 | 14.394 | 1.584 | 304-326 |
| AD-558393.1 | 14.017 | 1.825 | 254-276 |
| AD-558378.1 | 18.296 | 0.945 | 219-241 |
| AD-558361.1 | 15.926 | 1.921 | 202-224 |
| AD-558312.1 | 27.703 | 7.359 | 153-175 |

### Example 6. Combinations of dsRNA Agents Targeting Combinations of Complement Components

[0761] In order to determine whether hemolytic activity can be strongly suppressed using a combination of a dsRNA agent targeting complement component C3 (C3) and a dsRNA agent targeting complement component C5 (C5) or a dsRNA agent targeting complement component factor B (CFB) as compared to use of a single dsRNA targeting C3, C5, or CFB alone, in vitro double reconstitution studies were performed.

[0762] Briefly, in vitro complement combination modeling was conducted using sera depleted of two complement components and adding individual proteins back at various concentrations. All reagents were purchased from Complement Technology (Tyler, Texas), unless otherwise stated. An Alternative Hemolysis (AH) assay was performed by reconstituting C3 and CFB Complement component depleted human sera with a range of concentrations of C3 and CFB protein. Ten percent reconstituted serum was added to GVBE and 5 mM MgEGTA with 25% rabbit erythrocytes (Er). Samples were incubated at 37° C. for one hour, with shaking. Hemolysis was stopped with addition of GVBE at a 1:1 ratio to samples. Samples were centrifuged, supernatants were transferred, and absorbance measured at 541 nm. Hemolytic activity was calculated by subtracting negative control sample and normalizing to positive control samples, where negative control was buffer and Er only and positive control was water and Er only.

[0763] The results of dual targeting of C3 and CFB are depicted in FIG. 2A. In particular, the hemolytic activity (alternative hemolysis, AH) in human sera depleted of C3 and CFB is shown as a heatmap with higher hemolysis levels being medium gray (top left corner, “normal range”) and lower being darker gray. The concentration of C3 was plotted on the Y axis and the concentration of CFB on the X axis.

[0764] Normal levels of CFB and C3 yielded full hemolytic activity. Decreasing either C3 or CFB level decreased hemopytic activity. siRNA administration in non-human promates showed that C3 levels could be suppressed to 200 μg/ml levels; a similar reduction is expected in human sera. Assuming 200 μg/ml as the initial level of C3, FIG. 2A demonstrates that suppression of CFB to about 40 μg/ml (about 80% silencing) reduces hemolytic activity to levels below 10%. Therefore, dual targeting of C3 and CFB can achieve near-complete suppression of AH.

[0765] It should be noted that CFB suppression does not impact Classical Hemolysis (CH), therefore no combination data was generated for CH.

[0766] FIG. 2B depicts the results of dual dose response of C3 and C5 in depleted serum reconstituted with varying levels of C3 and C5 and assayed for AH as described above. C3 was plotted on the Y-axis and C5 on the X-axis. Normal levels of both C3 and C5 produced high levels of hemolytic activity; decreasing C5 levels lowered the AH. A dose response for C3 was also observed. Although it is known that administration of a dsRNA agent targeting C5, cemdisiran, to human subjects can achieve C5 silencing down to the range of about 1-3 μg/ml, further decrease in hemolytic activity can be achieved by concurrently decreasing the level of C3 protein.

[0767] The effect of dual targeting C3 and C5 on classical hemolytic activity was also determined using a Classical Hemolysis (CH) assay. C3 and C5 depleted human sera was reconstituted with a range of concentrations of C3 and C5 proteins. Reconstituted serum (0.7%) was added to GVB⁺⁺ with 13.4% antibody sensitized sheep erythrocytes (EA). Samples were incubated at 37° C. for one hour, with shaking. Samples were centrifuged, supernatants were transferred, and absorbance measured at 541 nm Hemolytic activity was calculated by subtracting negative control sample and normalizing to positive control samples, where negative control was buffer and Er only and positive control was water and Er only.

[0768] FIG. 2C depicts the results of C3 and C5 CH reconstitution experiments; it demonstrates that targeting both C3 and C5 resulted in benefit on CH. The observed effect of C3 suppression on CH activity when C5 is ≤3 μg/ml could not by resolved by determining the level of active C5b-9 formation to assess classical hemolysis activity using the Wieslab® Complement Classical Pathway (CCP) assay (FIG. 2D). The CCP assay (Wieslab® COMPL CP310, IBL America) was conducted according to manufacturer's protocol. Briefly, in vitro complement combination modeling was conducted using sera depleted of two complement components and adding individual proteins back at various concentrations. C3 and C5 Complement component depleted human sera was reconstituted with a range of concentrations of C3 and C5 protein. Reconstituted depleted sera were diluted to a final sera concentration of 1:101. Samples were added to wells and incubated for 1 hour at 37° C. Plates were washed three times and then 100 μl of conjugate solution was added to each well. Plates were incubated for 30 minutes at room temperature then washed three times. Substrate solution (100 μl) was added to each well and incubated for 30 minutes at room temperature. Reaction was stopped with 100 μl of 5 mM EDTA and absorbance was read at 405 nm. Activity was calculated by subtracting blank control from all values and then normalizing to positive control.

[0769] The ability of a combination of a dsRNA agent targeting complement component C3 (C3) and a dsRNA agent targeting complement component C5 (C5) or complement component factor B (CFB) to further suppress hemolytic activity as compared to use of a single dsRNA targeting C3, C5, or CFB alone was also assessed in vivo in non-human primates (NHPs), cynomologus monkeys (Macaca fascicularis).

[0770] Cynomologus monkeys were subcutaneously administered a single 6 mg/kg dose of a dsRNA agent targeting C3; or a dsRNA agent targeting CFB; or a dsRNA agent targeting C5; or a single 6 mg/kg dose of a dsRNA agent targeting C3 and 6 mg/kg dose of a dsRNA agent targeting CFB; or a single 6 mg/kg dose of a dsRNA agent targeting C3 and 6 mg/kg dose of a dsRNA agent targeting C5; or a single 6 mg/kg dose of a dsRNA agent targeting CFB and 6 mg/kg dose of a dsRNA agent targeting C5 on Day 1. The study design in depicted in the Table below.

| | | | | | Number | | |
|---|---|---|---|---|---|---|---|
| | | | Dose | Dose | of Male | Dose | End of |
| Group | Target(s) | Test Article | Route | (mg/kg) | Animals | Regimen | Study |
| 2 | C3 | AD-570714 | SubQ | 6 | 3 | Day 1 | Day 29 |
| 3 | CFB | AD-560018 | SubQ | 6 | 3 | Day 1 | Day 29 |
| 4 | C5 | AD-61679 | SubQ | 6 | 3 | Day 1 | Day 29 |
| 5 | C3 | AD-570714 | SubQ | 6 | 3 | Day 1 | Day 29 |
| | CFB | AD-560018 | | 6 | | | |
| 6 | C3 | AD-570714 | SubQ | 6 | 3 | Day 1 | Day 29 |
| | C5 | AD-61679 | | 6 | | | |
| 7 | CFB | AD-560018 | SubQ | 6 | 3 | Day 1 | Day 29 |
| | C5 | AD-61679 | | 6 | | | |

[0771] On Day −6, 1 pre-dose, and Days 8, 15, 22, and 29 post-dose, serum samples were obtained from the NHPs and the levels of C3, C5, and CFB protein and the alternative and classical hemolytic activities and the Wieslab® CAP and CCP activities were determined.

[0772] The level of C3 protein was determined by ELISA. Briefly, C3 protein was measured by a cynomolgus cross-reactive ELISA (C3 Human ELISA, Hycult HK366) according to the manufacturer's protocol. Serum was diluted by 1:40,000. C3 levels were normalized to individual animal's pre-dose levels to determine percent of C3 remaining.

[0773] The level of C5 protein was also determined by ELISA. Briefly, C5 was measured by a cynomolgus cross-reactive ELISA (Human Complement C5 ELISA Kit, Abcam ab125963) according to the manufacturer's protocol. Serum was diluted by 1:20,000 for pre-dose and day 8 samples and 1:5,000 for silenced samples days 12, 22, and 29. C5 levels were normalized to individual animal's pre-dose levels to determine % C5 remaining.

[0774] Serum CFB was measured at 1:20 dilution by quantitative analysis of western blot, using 4-12% Bis-Tris gels and imaged on Li-Cor Odyssey CLx. (1°: ProteinTech 10170-1-AP 1:50, 2°: Goat anti-Rabbit HRP).

[0775] The alternative and classical hemolytic activities were determined. The NHP alternative hemolysis was performed as briefly described. Serum (5.6%) was added to GVB° (Complement Technology, Tyler, Texas) and 5 mM MgEGTA with 25% rabbit erythrocytes (Er, Complement Technology, Tyler, Texas). Samples were incubated at 37° C. for 1 hour, with shaking. Hemolysis was stopped with addition of GVBE (Complement Technology, Tyler, Texas) at a 1:1 ratio to samples. Samples were centrifuged, supernatants were transferred, and absorbance measured at 541 nm. Hemolytic activity was calculated by subtracting negative control sample and normalizing to positive control samples, where negative control was buffer and Er only and positive control was water and Er only. Then individual animal samples were normalized to their average pre-dose samples. The NHP classical pathway hemolysis was preformed as briefly described. 1.77% serum was added to GVB++ (Complement Technology, Tyler, Texas) with 13.4% antibody sensitized sheep erythrocytes (EA, Complement Technology, Tyler, Texas). Samples were incubated at 37° C. for 1 hour, with shaking. Samples were centrifuged, supernatants were transferred, and absorbance measured at 541 nm. Hemolytic activity was calculated by subtracting negative control sample and normalizing to positive control samples, where negative control was buffer and Er only and positive control was water and EA only. Then individual animal samples were normalized to their average pre-dose samples.

[0776] The level of active C5b-9 formation to assess alternative hemolysis activity and classical hemolysis activity was also determined using the Wieslab® Complement Classical Pathway (CCP) assay as described above and the Wieslab® Complement Alternative Pathway (CAP) assay. The CAP assay (COMPL AP330 RUO, IBL America) was conducted according to manufacturer's protocol. Sera were diluted to a final sera concentration of 1:18. Samples were added to wells and incubated for 1 hour at 37° C. Plates were washed 3 times and then 100 μl of conjugate solution was added to each well. Plates were incubated for 30 minutes at room temperature then washed 3 times. Substrate solution (100 μl) was added to each well and incubated for 30 minutes at room temperature. Reaction was stopped with 100 μl of 5 mM EDTA and absorbance was read at 405 nm. Activity was calculated by subtracting blank control from all values and then normalizing to positive control. For both CAP and CCP activity values were then normalized to individual animals' average pre-dose.

[0777] The results of these assays are depicted in FIGS. 3A-3E. In particular, FIG. 3A demonstrates that a single 6 mg/kg dose of a dsRNA agent targeting C3 suppressed C3 protein up to 90% (˜110 μg/ml) in serum. As expected, silencing CFB with a dsRNA agent targeting CFB caused C3 protein levels to slightly increase. FIG. 3A also demonstrates that silencing C5 with a dsRNA agent targeting C5 left C3 protein levels unaffected and that neither a dsRNA agent targeting C3 nor a dsRNA agent targeting CFB affected C5 protein levels.

[0778] FIG. 3B demonstrates that a single 6 mg/kg dose of a dsRNA agent targeting C3 or a single 6 mg/kg dose of a dsRNA agent targeting CFB showed similar suppression of alternative hemolysis (about 60% suppression) and the combination of a single 6 mg/kg dose of a dsRNA agent targeting C3 and a 6 mg/kg dose of a dsRNA agent targeting CFB suppressed alternative hemolysis by about 90%. FIG. 3C demonstrates that the combination of a single 6 mg/kg dose of a dsRNA agent targeting C3 and 6 mg/kg dose of a dsRNA agent targeting C5 have the greatest impact on classical hemolysis.

[0779] As depicted in FIG. 3D, using the Wieslab® Complement alternative Pathway (CAP) assay, silencing either CFB or C3 or silencing CFB and C3, CFB and C5, and C3 and C5 inhibited alternative pathway activity. Silencing C5 alone had an intermediate effect in the Wieslab® CAP assay.

[0780] FIG. 3E demonstrates that C3 or CFB suppression did not confer a benefit on silencing classical pathway activity beyond that of C5 silencing.

[0781] In summary, the combination of a dsRNA agent targeting C3 and a dsRNA agent targeting CFB effectively suppressed alternative hemolysis activity to less than about 10%, while the combination of a dsRNA agent targeting C3 and a dsRNA agent targeting C5 effectively suppresses classical hemolysis activity.

### EQUIVALENTS

[0782] Those skilled in the art will recognize, or be able to ascertain using no more than routine experimentation, many equivalents to the specific embodiments and methods described herein. Such equivalents are intended to be encompassed by the scope of the following claims.

The application's sequence listing, which the Patent Office published only in electronic form, follows.

SEQUENCE LISTING (1517 sequences)

SEQ ID NO: 1 - DNA, 2646 bp, Homo sapiens
  source 1..2646: mol_type = unassigned DNA
gacttctgcagtttctgtttccttgactggcagctcagcggggccctcccgcttggatgttccgggaaagtgatgtgggtaggacaggcggggcgagccgcaggtgccagaacacagattgtataaaaggctgggggctggtggggagcaggggaagggaatgtgaccaggtctaggtctggagtttcagcttggacactgagccaagcagacaagcaaagcaagccaggacacaccatcctgccccaggcccagcttctctcctgccttccaacgccatggggagcaatctcagcccccaactctgcctgatgccctttatcttgggcctcttgtctggaggtgtgaccaccactccatggtctttggcccggccccagggatcctgctctctggagggggtagagatcaaaggcggctccttccgacttctccaagagggccaggcactggagtacgtgtgtccttctggcttctacccgtaccctgtgcagacacgtacctgcagatctacggggtcctggagcaccctgaagactcaagaccaaaagactgtcaggaaggcagagtgcagagcaatccactgtccaagaccacacgacttcgagaacggggaatactggccccggtctccctactacaatgtgagtgatgagatctctttccactgctatgacggttacactctccggggctctgccaatcgcacctgccaagtgaatggccgatggagtgggcagacagcgatctgtgacaacggagcggggtactgctccaacccgggcatccccattggcacaaggaaggtgggcagccagtaccgccttgaagacagcgtcacctaccactgcagccgggggcttaccctgcgtggctcccagcggcgaacgtgtcaggaaggtggctcttggagcgggacggagccttcctgccaagactccttcatgtacgacacccctcaagaggtggccgaagctttcctgtcttccctgacagagaccatagaaggagtcgatgctgaggatgggcacggcccaggggaacaacagaagcggaagatcgtcctggacccttcaggctccatgaacatctacctggtgctagatggatcagacagcattggggccagcaacttcacaggagccaaaaagtgtctagtcaacttaattgagaaggtggcaagttatggtgtgaagccaagatatggtctagtgacatatgccacataccccaaaatttgggtcaaagtgtctgaagcagacagcagtaatgcagactgggtcacgaagcagctcaatgaaatcaattatgaagaccacaagttgaagtcagggactaacaccaagaaggccctccaggcagtgtacagcatgatgagctggccagatgacgtccctcctgaaggctggaaccgcacccgccatgtcatcatcctcatgactgatggattgcacaacatgggcggggacccaattactgtcattgatgagatccgggacttgctatacattggcaaggatcgcaaaaacccaagggaggattatctggatgtctatgtgtttggggtcgggcctttggtgaaccaagtgaacatcaatgctttggcttccaagaaagacaatgagcaacatgtgttcaaagtcaaggatatggaaaacctggaagatgttttctaccaaatgatcgatgaaagccagtctctgagtctctgtggcatggtttgggaacacaggaagggtaccgattaccacaagcaaccatggcaggccaagatctcagtcattcgcccttcaaagggacacgagagctgtatgggggctgtggtgtctgagtactttgtgctgacagcagcacattgtttcactgtggatgacaaggaacactcaatcaaggtcagcgtaggaggggagaagcgggacctggagatagaagtagtcctatttcaccccaactacaacattaatgggaaaaaagaagcaggaattcctgaattttatgactatgacgttgccctgatcaagctcaagaataagctgaaatatggccagactatcaggcccatttgtctcccctgcaccgagggaacaactcgagctttgaggcttcctccaactaccacttgccagcaacaaaaggaagagctgctccctgcacaggatatcaaagctctgtttgtgtctgaggaggagaaaaagctgactcggaaggaggtctacatcaagaatggggataagaaaggcagctgtgagagagatgctcaatatgccccaggctatgacaaagtcaaggacatctcagaggtggtcacccctcggttcctttgtactggaggagtgagtccctatgctgaccccaatacttgcagaggtgattctggcggccccttgatagttcacaagagaagtcgtttcattcaagttggtgtaatcagctggggagtagtggatgtctgcaaaaaccagaagcggcaaaagcaggtacctgctcacgcccgagactttcacatcaacctctttcaagtgctgccctggctgaaggagaaactccaagatgaggatttgggttttctataaggggtttcctgctggacaggggcgtgggattgaattaaaacagctgcgacaacaaaaaaaaaaaaaaaaaaaa

SEQ ID NO: 2 - DNA, 2767 bp, Mus musculus
  source 1..2767: mol_type = unassigned DNA
gctccatcacacagtccatggaaagactgatcttttaaattgggggtagtggaggtggtggtctgtgcttgttaggaggggtctgggggctaagagggagctttgaaagggaagttctggcccttggtcagtcaagggtggggctcacatagtttctgtttcctcagttggcagttcagctggggccctccttcatgaatgttccgggaagcagtggctgcgtgcgcagggtaggctggccaggctgcagatgccagagcagattgcataaaaggttaggggacagtgggaaaggggtgtagccagatccagcatttgggtttcagtttggacaggaggtcaaataggcacccagagtgacctggagagggctttgggccactggactctctggtgctttccatgacaatggagagcccccagctctgcctcgtcctcttggtcttaggcttctcctctggaggtgtgagcgcaactccagtgcttgaggcccggccccaagtctcctgctctctggagggagtagagatcaaaggcggctcctttcaacttctccaaggcggtcaggccctggagtacctatgtccctctggcttctacccataccccgtgcagactcgaacctgcagatccacaggctcctggagcgacctgcagacccgagaccaaaagattgtccagaaggcggaatgcagagcaatacgctgcccacgaccgcaggactttgaaaatggggaattctggccccggtcccccttctacaacctgagtgaccagatttcttttcaatgctatgatggttacgttctccggggctctgctaatcgcacctgccaagagaatggccggtgggatgggcaaacagcaatttgtgatgatggagctggatactgtcccaatcccggtattcctattgggacaaggaaggtgggtagccaataccgccttgaagacattgttacttaccactgcagccggggacttgtcctgcgtggctcccagaagcgaaagtgtcaagaaggtggctcatggagtgggacagagccttcctgccaagattccttcatgtatgacagccctcaagaagtggccgaagcattcctatcctccctgacagagaccatcgaaggagccgatgctgaggatgggcacagcccaggagaacagcagaagaggaagattgtcctagacccctcgggctccatgaatatctacctggtgctagatggatcagacagcatcggaagcagcaacttcacaggggctaagcggtgcctcaccaacttgattgagaaggtggcgagttacggggtgaggccacgatatggtctcctgacatatgctacagtccccaaagtgttggtcagagtgtctgatgagaggagtagcgatgccgactgggtcacagagaagctcaaccaaatcagttatgaagaccacaagctgaagtcagggaccaacaccaagagggctctccaggctgtgtatagcatgatgagctgggcaggggatgccccgcctgaaggctggaatagaacccgccatgtcatcatcattatgactgatggcttgcacaacatgggtggaaaccctgtcactgtcattcaggacatccgagccttgctggacatcggcagggatcccaaaaatcccagggaggattacctggatgtgtatgtgtttggggtcgggcctctggtggactccgtgaacatcaatgccttagcttccaaaaaggacaatgagcatcatgtgtttaaagtcaaggatatggaagacctggagaatgttttctaccaaatgattgatgaaaccaaatctctgagtctctgtggcatggtgtgggagcataaaaaaggcaacgattatcataagcaaccatggcaagccaagatctcagtcactcgccctctgaaaggacatgagacctgtatgggggccgtggtgtctgagtacttcgtgctgacagcagcgcactgcttcatggtggatgatcagaaacattccatcaaggtcagcgtggggggtcagaggcgggacctggagattgaagaggtcctgttccaccccaaatacaatattaatgggaaaaaggcagaagggatccctgagttctatgattatgatgtggccctagtcaagctcaagaacaagctcaagtatggccagactctcaggcccatctgtctcccctgcacggagggaaccacacgagccttgaggcttcctcagacagccacctgcaagcagcacaaggaacagttgctccctgtgaaggatgtcaaagctctgtttgtatctgagcaagggaagagcctgactcggaaggaggtgtacatcaagaatggggacaagaaagccagttgtgagagagatgctacaaaggcccaaggctatgagaaggtcaaagatgcctctgaggtggtcactccacggttcctctgcacaggaggggtggatccctatgctgaccccaacacatgcaaaggagattccgggggccctctcattgttcacaagagaagccgcttcattcaagttggtgtgattagctggggagtagtagatgtctgcagagaccagaggcggcaacagctggtaccctcttatgcccgggacttccacatcaacctcttccaggtgctgccctggctaaaggacaagctcaaagatgaggatttgggttttctataaagagcttcctgcagggagagtgtgaggacagattaaagcagttacaataacaaaaaaaaaaaaaaaaaaaaaa

SEQ ID NO: 3 - DNA, 2763 bp, Mus musculus
  source 1..2763: mol_type = unassigned DNA
gctccatcacacagtccatggaaagactgatcttttaaattgggggtagtggaggtggtggtctgtgcttgttaggaggggtctgggggctaagagggagctttgaaagggaagttctggcccttggtcagtcaagggtggggctcacatagtttctgtttcctcagttggcagttcagctggggccctccttcatgaatgttccgggaagcagtggctgcgtgcgcagggtaggctggccaggctgcagatgccagagcagattgcataaaaggttaggggacagtgggaaaggggtgtagccagatccagcatttgggtttcagtttggacaggaggtcaaataggcacccagagtgacctggagagggctttgggccactggactctctggtgctttccatgacaatggagagcccccagctctgcctcgtcctcttggtcttaggcttctcctctggaggtgtgagcgcaactccagtgcttgaggcccggccccaagtctcctgctctctggagggagtagagatcaaaggcggctcctttcaacttctccaaggcggtcaggccctggagtacctatgtccctctggcttctacccataccccgtgcagactcgaacctgcagatccacaggctcctggagcgacctgcagacccgagaccaaaagattgtccagaaggcggaatgcagagcaatacgctgcccacgaccgcaggactttgaaaatggggaattctggccccggtcccccttctacaacctgagtgaccagatttcttttcaatgctatgatggttacgttctccggggctctgctaatcgcacctgccaagagaatggccggtgggatgggcaaacagcaatttgtgatgatggagctggatactgtcccaatcccggtattcctattgggacaaggaaggtgggtagccaataccgccttgaagacattgttacttaccactgcagccggggacttgtcctgcgtggctcccagaagcgaaagtgtcaagaaggtggctcatggagtgggacagagccttcctgccaagattccttcatgtatgacagccctcaagaagtggccgaagcattcctatcctccctgacagagaccatcgaaggagccgatgctgaggatgggcacagcccaggagaacagcagaagaggaagattgtcctagacccctcgggctccatgaatatctacctggtgctagatggatcagacagcatcggaagcagcaacttcacaggggctaagcggtgcctcaccaacttgattgagaaggtggcgagttacggggtgaggccacgatatggtctcctgacatatgctacagtccccaaagtgttggtcagagtgtctgatgagaggagtagcgatgccgactgggtcacagagaagctcaaccaaatcagttatgaagaccacaagctgaagtcagggaccaacaccaagagggctctccaggctgtgtatagcatgatgagctgggcaggggatgccccgcctgaaggctggaatagaacccgccatgtcatcatcattatgactgatggcttgcacaacatgggtggaaaccctgtcactgtcattcaggacatccgagccttgctggacatcggcagggatcccaaaaatcccagggaggattacctggatgtgtatgtgtttggggtcgggcctctggtggactccgtgaacatcaatgccttagcttccaaaaaggacaatgagcatcatgtgtttaaagtcaaggatatggaagacctggagaatgttttctaccaaatgattgatgaaaccaaatctctgagtctctgtggcatggtgtgggagcataaaaaaggcaacgattatcataagcaaccatggcaagccaagatctcagtcactcgccctctgaaaggacatgagacctgtatgggggccgtggtgtctgagtacttcgtgctgacagcagcgcactgcttcatggtggatgatcagaaacattccatcaaggtcagcgtggggggtcagaggcgggacctggagattgaagaggtcctgttccaccccaaatacaatattaatgggaaaaaggcagaagggatccctgagttctatgattatgatgtggccctagtcaagctcaagaacaagctcaagtatggccagactctcaggcccatctgtctcccctgcacggagggaaccacacgagccttgaggcttcctcagacagccacctgcaagcagcacaaggaacagttgctccctgtgaaggatgtcaaagctctgtttgtatctgagcaagggaagagcctgactcggaaggaggtgtacatcaagaatggggacaagccagttgtgagagagatgctacaaaggcccaaggctatgagaaggtcaaagatgcctctgaggtggtcactccacggttcctctgcacaggaggggtggatccctatgctgaccccaacacatgcaaaggagattccgggggccctctcattgttcacaagagaagccgcttcattcaagttggtgtgattagctggggagtagtagatgtctgcagagaccagaggcggcaacagctggtaccctcttatgcccgggacttccacatcaacctcttccaggtgctgccctggctaaaggacaagctcaaagatgaggatttgggttttctataaagagcttcctgcagggagagtgtgaggacagattaaagcagttacaataacaaaaaaaaaaaaaaaaaaaaaa

SEQ ID NO: 4 - DNA, 2573 bp, Rattus norvegicus
  source 1..2573: mol_type = unassigned DNA
cagcaggggccctccttcatgaatgttccgggaagcagcgtctgtgcagggtaggttggccaggctgcaggtgccagagcagattgcataaaaggttaggggccggtgggaaaggggtgtagccagatccagcactggagtttcagtctggacagcaagtcaagtagccacccagagtgaactggaaagggcttttggccacgggctttccatgacaatggagggtccccagctctgcttagtcctcttggtcttaggcctctcctccggaggtgtgagcgcaactccagtgcttgaggcccggccccaggtctcttgctctctggagggagtagagatcaaaggcggctccttccaacttctccaagacggtcaggccctggagtacctgtgtccctctggcttctacccataccctgtgcagactcgaacctgcaaatccacaggctcctggagtgtcctccagacccgggaccaaaagattgtcaagaaggcagaatgcagagcaatacgctgcccacgaccacaggactttgaaaatggggagttctggccccggtccccctactacaacctgagtgatcagatttcttttcaatgctatgatggctacactctccggggctctgctaatcgcacctgccaagagaatggccggtgggatgggcaaacagcaatctgtgatgatggagcgggatactgtcccaacccgggtattcctattgggacaaggaaggtgggaagccagtaccgtcttgaagacactgtcacttaccactgtagtcggggacttgtcctacgtggctcccagcagcgaaggtgccaggaaggtggctcgtggagtgggacagagccttcctgccaagattccttcatgtacgacagccctcaagaggtggccgaagcatttctatcctccctgacagagaccatcgaaggagcagatgcggaggatgggcacagcccaggggaacagcagaagaggaagattatcctggacccctcgggctccatgaatatctacatggtgctggatggatccgacagcatcggggccagcaacttcacaggggccaagcggtgtctcgccaacttgattgagaaggtggcgagttatggggtgaagccaagatacggtctagtgacatatgccacagtccccaaagtcttggtcagagtgtctgaggagaggagtagtgatgccgactgggtcacagagaagctcaaccaaatcagttatgaagaccacaagctgaagtcagggaccaacaccaagaaggctctccaggctgtatacagcatgatgagctggccaggggatgctccgcctgaaggctggaatcgaacccgccacgtcatcatcatcatgactgatggcttgcacaacatgggtggagaccctgtcactgtcattgaggacatccgagacttgctggatattggcagggatcgcaaaaatccccgggaggattatttggatgtgtatgtgtttggggtcgggcctctggtggaccctgtgaacatcaatgccttggcttccaaaaagaacaatgagcagcatgtgttcaaggtcaaggacatggaggatctggagaacgtcttctacaaaatgatcgatgaaaccaaatctctgggtctctgtggcatggtgtgggagcatcagaaaggcggtgattattacaagcaaccatggcaagccaagatctcagtcactcgtcctctgaaaggacatgagaactgtatgggggccgtggtgtccgagtacttcgtgctgacagcagcgcattgcttcacagtggaagatcagaaacactccatcaaggtcaacgtggaggggaaaaggcgggacctggagattgaagaggtcctgttccaccctaattacgacatcaatgggaaaaaggcagaaggaatctctgagttctatgactatgatgttgccctcatcaagctcaagaccaagctgaagtacagccagactctcaggcccatctgtctcccctgcacagagggaaccacccgagccttgcggcttcctcagacagccacctgcaaacagcacaaggaagagttgctccctatgaaggacgtcaaagctctgtttgtatccgaggaagggaagaagctgacccggaaggaggtgtacatcaagaatggggaaaagaaagccagttgtgagagagatgctacaaaggcccaaggctatgagaaggtcaaagttgcctctgaggtggtcacccccaggttcctgtgcaccggaggggtagatccctatgctgaccccaacacatgcaaaggagactccgggggccctctcattgttcacaagagaagccgcttcattcaagttggtgtgatcagctggggagtagtggatgtctgcaaagacccgaggcggcaacagttggtgccctcctatgcccgggacttccacatcaatctcttccaggtgctgccctggctaaaggagaagctcaaagacgaggacttgggtttcttataaggagcttcctgctgggagggtgagggcagattaaagcagctacaatacaaatacaaaaaaaaaaaaaaaa

SEQ ID NO: 5 - DNA, 2334 bp, Pan troglodytes
  source 1..2334: mol_type = unassigned DNA
cccaggcccagcttctctcctgccttccaacgccatggggagcaatctcagcccccaactctgcctgatgcccttcatcttgggcctcttgtctggaggtgtgaccaccactccatggcctttggcccagccccaggaatcctgctctctggagggggtagagatcaaaggcggctccttccgacttctccaagagggccaggcactggagtacgtgtgtccttctggcttctacccgtaccctgtgcagacacgtacctgcagatctacggggtcctggagcaccctgaagactcaagtccaaaagactgtcaggaaggcagagtgcagagcaatccactgtccaagaccacacgacttcgagaacggggaatactggccccggtctccctactacaatgtgagtgatgagatctctttccactgctatgacggttacactctccggggctctgccaatcgcacctgccaagtgaatggccggtggagtgggcagacagcgatctgtgacaacggagcggggtactgctccaacccgggcatccccattggcacaaggaaggtgggcagccagtaccgccttgaagacagcgtcacctaccactgcagccgggggcttaccctgcgtggctcccagcggcgaacgtgtcaggaaggtggctcttggagcgggacggagccttcttgccaagactccttcatgtacgacacccctcaagaggtggccgaagctttcctgtcttccctgacagagaccatagaaggagtcgatgctgaggatgggcacggcccaggggaacaacagaagcggaagatcgtcctggacccttcaggctccatgaacatctacctggtgctagatggatcagacagcattggggccagcaacttcacaggagccaaaaagtgtctagtcaacttaattgagaaggtggcaagttatggtgtgaagccaagatatggtctagtgacatatgccacacaccccaaaatttgggtcaaagtgtctgatccagacagcagtaatgcagactgggtcacgaagcagctcaatgaaatcaattatgaagaccacaagttgaagtcagggactaacaccaagaaggccctccaggcagtgtacagcatgatgagctggccagatgacatccctcctgaaggctggaaccgcacccgccatgtcatcatcctcatgactgatggattgcacaacatgggcggggacccaattactgtcattgatgagatccgggacttgctatacattggcaaggatcgcaaaaacccaagggaggattatctggatgtctatgtgtttggggtcgggcctttggtgaaccaagtgaacatcaatgctttggcttccaagaaagacaatgagcaacatgtgttcaaagtcaaggatatggaaaacctggaagatgttttctaccaaatgattgatgaaagccagtctctgagtctctgtggcatggtttgggaacacaggaagggtaccgattaccacaagcaaccatggcaagccaagatctcagtcattcgcccttcaaagggacacgagagctgtatgggggctgtggtgtctgagtactttgtgctgacagcagcacactgtttcactgtggatgacaaggaacactcaatcaaggtcagcgtaggaggggagaagcgggacctggagatagaagtagtcctatttcaccccaactacaacattaatgggaaaaaagcagcaggaattcctgaattttatgactatgacgttgccctgatcaagctcaagaataagctgaaatatggccagactatcaggcccatttgtctcccctgcaccgagggaacaactcgagctttgaggcttcctccaactaccacttgccagcaacaaaaggaagagctgctccctgcacaggatatcaaagctctgtttgtgtctgaggaggagaaaaagctgactcggaaggaggtctacatcaagaatggggataagaaaggcagctgtgagagagatgctcaatatgccccaggctatgacaaagtcaaggacatctcagaggtggtcacccctcggttcctttgtactggaggagtgagtccctatgctgaccccaatacttgcagaggtgattctggcggccccttgatagttcacaaaagaagtcgtttcattcaagttggtgtaatcagctggggagtagtggatgtctgcaaaaaccagaagcggcaaaagcaggtacctgctcacgcccgagactttcacatcaacctctttcaagtgctgccctggctgaaggagaaactccaagatgaggatttgggttttctataaggggt

SEQ ID NO: 6 - DNA, 2289 bp, Macaca fascicularis
  source 1..2289: mol_type = unassigned DNA
atggggagcagtctcagcccccagctctacctgatgcccttcatcttgggcctcttatctgcaggtgtgaccaccactccattgtcttcggcccagcctcaaggatcctgctctctggagggggtagagatcaaaggtggctccttccgacttctccaagagggccaggcactggaatacgtgtgtccttctggcttctacccgtaccctgtgcagacacgtacctgcagatccacggggtcctggagcaccctgcagactcaagatcgaaaaactgtcaagaaggcagagtgcagagcaatccgctgtccacgaccacaggacttcgagaacggggaataccggccccggtctccctactacaatgtgagtgatgagatctctttccactgctatgacggttacactctccggggctctgccaatcgcacctgccaagtgaatggccggtggagtgggcagacagcgatctgtgacaacggagcggggtactgctccaacccaggcatccccattggcacaaggaaggtgggcagccggtaccgccttgaagacagcgtcacctaccactgcagccgggggcttaccctgcgtggctcccagcggcgaacatgtcaggaaggtggctcttggagcgggacggagccttcctgccaagactccttcatgtacgacacccctcaagaggtggccgaagctttcctgtcttccctgacggagaccatagaaggagtcgatgccgaggatgggcacagcccaggggaacaacagaagcggaggatcatcctagacccttcaggctccatgaacatctacctggtgctagatggatcagacagcattggggccggcaacttcacaggagccaaaaagtgtctagtcaacttaattgagaaggtggcaagttatggtgtgaagccaagatatgctctagtgacatatgccacataccccagaatttgggtcaaagtgtctgaccaagagagcagcaatgcagactgggtcacgaagaagctcagtgaaatcaattatgaagaccacaagttgaagtcagggactaacaccaagagggccctccaggcagtgtacagcatgatgagttggccagaggacatccctcctgaaggctggaaccgcacccgccatgtcatcatcctcatgaccgatggattgcacaacatgggcggggacccaattactgtcattgatgagatccgggacttgttatacatcggcaaggatcgtaaaaacccgagggaggattatctggatgtctatgtgtttggggttggacctttggtggaccaagtgaacatcaatgctttggcttccaagaaagacaatgagcaacatgtgttcaaagtcaaggatatggaaaacctggaagacgttttcttccaaatgattgatgaaagccagtctctgagtctctgtggcatggtttgggaacacacgacgggtaccgattaccacaagcaaccatggcaggccaagatctcagtcactcgcccttcgaagggacatgagagctgtatgggggctgtggtgtctgagtactttgtgctgacagcagcacattgttttactgtggacgacaaggaacactcgatcaaggtcagcgtggggaagaagcgggacctggagatagaaaaagtcctatttcaccccgactacaacattagcgggaaaaaagaagcaggaattcctgaattttatgactatgacgttgccctgatcaagctcaagaataagttgaattatgacccgactatcaggcccatttgtctcccctgcaccgagggaacaactcgagctttgaggcttcctccaactaccacttgccagcaacagaaggaagagctgctccctgcacaggatatcaaagctctgtttgtgtctgaggaggagaagaagctgactcggaaggaggtctacatcaagaatggggataagaaaggcagctgtgagagagatgctcaatatgccccaggctatgacaaagtcaaggacatctccgaggtggtcacccctcggttcctttgtactggaggagtgagtccctatgctgaccccaatacttgcagaggtgattctggcggccccttgatagttcacaagagaagtcgttttattcaagttggtgtcatcagctggggagtagtggatgtctgcaaaaaccagaagcggcaaaagcaggtacctgctcacgcccgagactttcacgtcaacctcttccaagtgctgccctggctgaaggagaaactccaagatgaggatttgggttttctc

SEQ ID NO: 7 - DNA, 2727 bp, Macaca fascicularis
  source 1..2727: mol_type = unassigned DNA
atttctggtccctaagtgggtggtctgggcttgttggggaggagctgaggccagaaggaggtactgaaggggagagtcctggaccttgggcagcaaagggtgggacttctgcagtttctgcttccttgactggcagctcagcggggccctcccgcttggatgttccgggaaagtgatgagggtaggacaggcggggcaagctgcaggtgccagaacacagattgcataaaaggccgggagctggtggggggcaggggaagggaatgtgaccaggtctaggtctggagtttcagcttggacactgagctaagtagacaagcaaaacaagccaggacacgccatcctgccccaggcccagcttctctcctgccttctaacgccatggggagcagtctcagcccccagctctacctgatgcccttcatcttgggcctcttatctgcaggtgtgaccaccactccattgtcttcggcccagcctcaaggatcctgctctctggagggggtagagatcaaaggtggctccttccgacttctccaagagggccaggcactggaatacgtgtgtccttctggcttctacccgtaccctgtgcagacacgtacctgcagatccacggggtcctggagcaccctgcagactcaagatcgaaaaactgtcaagaaggcagagtgcagagcaatccgctgtccacgaccacaggacttcgagaacggggaataccggccccggtctccctactacaatgtgagtgatgagatctctttccactgctatgacggttacactctccggggctctgccaatcgcacctgccaagtgaatggccggtggagtgggcagacagcgatctgtgacaacggagcggggtactgctccaacccaggcatccccattggcacaaggaaggtgggcagccggtaccgccttgaagacagcgtcacctaccactgcagccgggggcttaccctgcgtggctcccagcggcgaacgtgtcaggaaggtggctcttggagcgggacggagccttcctgccaagactccttcatgtacgacacccctcaagaggtggccgaagctttcctgtcttccctgacggagaccatagaaggagtcgatgccgaggatgggcacagcccaggggaacaacagaagcggaggatcatcctagacccttcaggctccatgaacatctacctggtgctagatggatcagacagcattggggccggcaacttcacaggagccaaaaagtgtctagtcaacttaattgagaaggtggcaagttatggtgtgaagccaagatatgctctagtgacatatgccacataccccagaatttgggtcaaagtgtctgaccaagagagcagcaatgcagactgggtcacgaagaagctcagtgaaatcaattatgaagaccacaagttgaagtcagggactaacaccaagagggccctccaggcagtgtacagcatgatgagttggccagaggacatccctcctgaaggctggaaccgcacccgccatgtcatcatcctcatgaccgatggattgcacaacatgggcggggacccaattactgtcattgatgagatccgggacttgttatacatcggcaaggatcgcaaaaacccgagggaggattatctggatgtctatgtgtttggggttggacctttggtggaccaagtgaacatcaatgctttggcttccaagaaagacaatgagcaacatgtgttcaaagtcaaggatatggaaaacctggaagacgttttcttccaaatgattgatgaaagccagtctctgagtctctgtggcatggtttgggaacacacgacgggtaccgattaccacaagcaaccatggcaggccaagatctcagtcactcgcccttcgaagggacatgagagctgtatgggggctgtggtgtctgagtactttgtgctgacagcagcacattgttttactgtggacgacaaggaacactcgatcaaggtcagcgtggggaagaagcgggacctggagatagaaaaagtcctatttcaccccgactacaacattagcgggaaaaaagaagcaggaattcctgaattttatgactatgacgttgccctgatcaagctcaagaaaaagttgaattatgacccgactatcaggcccatttgtctcccctgtaccgagggaacaactcgagctttgaggcttcctccaactaccacttgccagcaacagaaggaagagctgctccctgcacaggatatcaaagctctgtttgtgtctgaggaggagaagaagctgactcggaaggaggtctacatcaagaatggggataagaaaggcagctgtgagagagatgctcaatatgccccaggctatgacaaagtcaaggacatctcggaggtggtcacccctcggttcctttgtactggaggagtgagtccctatgctgaccccaatacttgcagaggtgattctggcggccccttgatagttcacaagagaagtcgtttcattcaagttggtgtcatcagctggggagtagtggatgtctgcaaaaaccagaagcggcaaaagcaggtacctgctcacgcccgagactttcacgtcaacctcttccaagtgctgccctggctgaaggagaaactccaagatgaggatttgggttttctctaaggggtttcctgctggacaggggcgcgggattgaattaaaacagctgcgacaaca

SEQ ID NO: 8 - DNA, 2646 bp, Homo sapiens
  source 1..2646: mol_type = unassigned DNA
ttttttttttttttttttttgttgtcgcagctgttttaattcaatcccacgcccctgtccagcaggaaaccccttatagaaaacccaaatcctcatcttggagtttctccttcagccagggcagcacttgaaagaggttgatgtgaaagtctcgggcgtgagcaggtacctgcttttgccgcttctggtttttgcagacatccactactccccagctgattacaccaacttgaatgaaacgacttctcttgtgaactatcaaggggccgccagaatcacctctgcaagtattggggtcagcatagggactcactcctccagtacaaaggaaccgaggggtgaccacctctgagatgtccttgactttgtcatagcctggggcatattgagcatctctctcacagctgcctttcttatccccattcttgatgtagacctccttccgagtcagctttttctcctcctcagacacaaacagagctttgatatcctgtgcagggagcagctcttccttttgttgctggcaagtggtagttggaggaagcctcaaagctcgagttgttccctcggtgcaggggagacaaatgggcctgatagtctggccatatttcagcttattcttgagcttgatcagggcaacgtcatagtcataaaattcaggaattcctgcttcttttttcccattaatgttgtagttggggtgaaataggactacttctatctccaggtcccgcttctcccctcctacgctgaccttgattgagtgttccttgtcatccacagtgaaacaatgtgctgctgtcagcacaaagtactcagacaccacagcccccatacagctctcgtgtccctttgaagggcgaatgactgagatcttggcctgccatggttgcttgtggtaatcggtacccttcctgtgttcccaaaccatgccacagagactcagagactggctttcatcgatcatttggtagaaaacatcttccaggttttccatatccttgactttgaacacatgttgctcattgtctttcttggaagccaaagcattgatgttcacttggttcaccaaaggcccgaccccaaacacatagacatccagataatcctcccttgggtttttgcgatccttgccaatgtatagcaagtcccggatctcatcaatgacagtaattgggtccccgcccatgttgtgcaatccatcagtcatgaggatgatgacatggcgggtgcggttccagccttcaggagggacgtcatctggccagctcatcatgctgtacactgcctggagggccttcttggtgttagtccctgacttcaacttgtggtcttcataattgatttcattgagctgcttcgtgacccagtctgcattactgctgtctgcttcagacactttgacccaaattttggggtatgtggcatatgtcactagaccatatcttggcttcacaccataacttgccaccttctcaattaagttgactagacactttttggctcctgtgaagttgctggccccaatgctgtctgatccatctagcaccaggtagatgttcatggagcctgaagggtccaggacgatcttccgcttctgttgttcccctgggccgtgcccatcctcagcatcgactccttctatggtctctgtcagggaagacaggaaagcttcggccacctcttgaggggtgtcgtacatgaaggagtcttggcaggaaggctccgtcccgctccaagagccaccttcctgacacgttcgccgctgggagccacgcagggtaagcccccggctgcagtggtaggtgacgctgtcttcaaggcggtactggctgcccaccttccttgtgccaatggggatgcccgggttggagcagtaccccgctccgttgtcacagatcgctgtctgcccactccatcggccattcacttggcaggtgcgattggcagagccccggagagtgtaaccgtcatagcagtggaaagagatctcatcactcacattgtagtagggagaccggggccagtattccccgttctcgaagtcgtgtggtcttggacagtggattgctctgcactctgccttcctgacagtcttttggtcttgagtcttcagggtgctccaggaccccgtagatctgcaggtacgtgtctgcacagggtacgggtagaagccagaaggacacacgtactccagtgcctggccctcttggagaagtcggaaggagccgcctttgatctctaccccctccagagagcaggatccctggggccgggccaaagaccatggagtggtggtcacacctccagacaagaggcccaagataaagggcatcaggcagagttgggggctgagattgctccccatggcgttggaaggcaggagagaagctgggcctggggcaggatggtgtgtcctggcttgctttgcttgtctgcttggctcagtgtccaagctgaaactccagacctagacctggtcacattcccttcccctgctccccaccagcccccagccttttatacaatctgtgttctggcacctgcggctcgccccgcctgtcctacccacatcactttcccggaacatccaagcgggagggccccgctgagctgccagtcaaggaaacagaaactgcagaagtc

SEQ ID NO: 9 - DNA, 2767 bp, Mus musculus
  source 1..2767: mol_type = unassigned DNA
ttttttttttttttttttttttgttattgtaactgctttaatctgtcctcacactctccctgcaggaagctctttatagaaaacccaaatcctcatctttgagcttgtcctttagccagggcagcacctggaagaggttgatgtggaagtcccgggcataagagggtaccagctgttgccgcctctggtctctgcagacatctactactccccagctaatcacaccaacttgaatgaagcggcttctcttgtgaacaatgagagggcccccggaatctcctttgcatgtgttggggtcagcatagggatccacccctcctgtgcagaggaaccgtggagtgaccacctcagaggcatctttgaccttctcatagccttgggcctttgtagcatctctctcacaactggctttcttgtccccattcttgatgtacacctccttccgagtcaggctcttcccttgctcagatacaaacagagctttgacatccttcacagggagcaactgttccttgtgctgcttgcaggtggctgtctgaggaagcctcaaggctcgtgtggttccctccgtgcaggggagacagatgggcctgagagtctggccatacttgagcttgttcttgagcttgactagggccacatcataatcatagaactcagggatcccttctgcctttttcccattaatattgtatttggggtggaacaggacctcttcaatctccaggtcccgcctctgaccccccacgctgaccttgatggaatgtttctgatcatccaccatgaagcagtgcgctgctgtcagcacgaagtactcagacaccacggcccccatacaggtctcatgtcctttcagagggcgagtgactgagatcttggcttgccatggttgcttatgataatcgttgccttttttatgctcccacaccatgccacagagactcagagatttggtttcatcaatcatttggtagaaaacattctccaggtcttccatatccttgactttaaacacatgatgctcattgtcctttttggaagctaaggcattgatgttcacggagtccaccagaggcccgaccccaaacacatacacatccaggtaatcctccctgggatttttgggatccctgccgatgtccagcaaggctcggatgtcctgaatgacagtgacagggtttccacccatgttgtgcaagccatcagtcataatgatgatgacatggcgggttctattccagccttcaggcggggcatcccctgcccagctcatcatgctatacacagcctggagagccctcttggtgttggtccctgacttcagcttgtggtcttcataactgatttggttgagcttctctgtgacccagtcggcatcgctactcctctcatcagacactctgaccaacactttggggactgtagcatatgtcaggagaccatatcgtggcctcaccccgtaactcgccaccttctcaatcaagttggtgaggcaccgcttagcccctgtgaagttgctgcttccgatgctgtctgatccatctagcaccaggtagatattcatggagcccgaggggtctaggacaatcttcctcttctgctgttctcctgggctgtgcccatcctcagcatcggctccttcgatggtctctgtcagggaggataggaatgcttcggccacttcttgagggctgtcatacatgaaggaatcttggcaggaaggctctgtcccactccatgagccaccttcttgacactttcgcttctgggagccacgcaggacaagtccccggctgcagtggtaagtaacaatgtcttcaaggcggtattggctacccaccttccttgtcccaataggaataccgggattgggacagtatccagctccatcatcacaaattgctgtttgcccatcccaccggccattctcttggcaggtgcgattagcagagccccggagaacgtaaccatcatagcattgaaaagaaatctggtcactcaggttgtagaagggggaccggggccagaattccccattttcaaagtcctgcggtcgtgggcagcgtattgctctgcattccgccttctggacaatcttttggtctcgggtctgcaggtcgctccaggagcctgtggatctgcaggttcgagtctgcacggggtatgggtagaagccagagggacataggtactccagggcctgaccgccttggagaagttgaaaggagccgcctttgatctctactccctccagagagcaggagacttggggccgggcctcaagcactggagttgcgctcacacctccagaggagaagcctaagaccaagaggacgaggcagagctgggggctctccattgtcatggaaagcaccagagagtccagtggcccaaagccctctccaggtcactctgggtgcctatttgacctcctgtccaaactgaaacccaaatgctggatctggctacacccctttcccactgtcccctaaccttttatgcaatctgctctggcatctgcagcctggccagcctaccctgcgcacgcagccactgcttcccggaacattcatgaaggagggccccagctgaactgccaactgaggaaacagaaactatgtgagccccacccttgactgaccaagggccagaacttccctttcaaagctccctcttagcccccagacccctcctaacaagcacagaccaccacctccactacccccaatttaaaagatcagtctttccatggactgtgtgatggagc

SEQ ID NO: 10 - DNA, 2763 bp, Mus musculus
  source 1..2763: mol_type = unassigned DNA
ttttttttttttttttttttttgttattgtaactgctttaatctgtcctcacactctccctgcaggaagctctttatagaaaacccaaatcctcatctttgagcttgtcctttagccagggcagcacctggaagaggttgatgtggaagtcccgggcataagagggtaccagctgttgccgcctctggtctctgcagacatctactactccccagctaatcacaccaacttgaatgaagcggcttctcttgtgaacaatgagagggcccccggaatctcctttgcatgtgttggggtcagcatagggatccacccctcctgtgcagaggaaccgtggagtgaccacctcagaggcatctttgaccttctcatagccttgggcctttgtagcatctctctcacaactggcttgtccccattcttgatgtacacctccttccgagtcaggctcttcccttgctcagatacaaacagagctttgacatccttcacagggagcaactgttccttgtgctgcttgcaggtggctgtctgaggaagcctcaaggctcgtgtggttccctccgtgcaggggagacagatgggcctgagagtctggccatacttgagcttgttcttgagcttgactagggccacatcataatcatagaactcagggatcccttctgcctttttcccattaatattgtatttggggtggaacaggacctcttcaatctccaggtcccgcctctgaccccccacgctgaccttgatggaatgtttctgatcatccaccatgaagcagtgcgctgctgtcagcacgaagtactcagacaccacggcccccatacaggtctcatgtcctttcagagggcgagtgactgagatcttggcttgccatggttgcttatgataatcgttgccttttttatgctcccacaccatgccacagagactcagagatttggtttcatcaatcatttggtagaaaacattctccaggtcttccatatccttgactttaaacacatgatgctcattgtcctttttggaagctaaggcattgatgttcacggagtccaccagaggcccgaccccaaacacatacacatccaggtaatcctccctgggatttttgggatccctgccgatgtccagcaaggctcggatgtcctgaatgacagtgacagggtttccacccatgttgtgcaagccatcagtcataatgatgatgacatggcgggttctattccagccttcaggcggggcatcccctgcccagctcatcatgctatacacagcctggagagccctcttggtgttggtccctgacttcagcttgtggtcttcataactgatttggttgagcttctctgtgacccagtcggcatcgctactcctctcatcagacactctgaccaacactttggggactgtagcatatgtcaggagaccatatcgtggcctcaccccgtaactcgccaccttctcaatcaagttggtgaggcaccgcttagcccctgtgaagttgctgcttccgatgctgtctgatccatctagcaccaggtagatattcatggagcccgaggggtctaggacaatcttcctcttctgctgttctcctgggctgtgcccatcctcagcatcggctccttcgatggtctctgtcagggaggataggaatgcttcggccacttcttgagggctgtcatacatgaaggaatcttggcaggaaggctctgtcccactccatgagccaccttcttgacactttcgcttctgggagccacgcaggacaagtccccggctgcagtggtaagtaacaatgtcttcaaggcggtattggctacccaccttccttgtcccaataggaataccgggattgggacagtatccagctccatcatcacaaattgctgtttgcccatcccaccggccattctcttggcaggtgcgattagcagagccccggagaacgtaaccatcatagcattgaaaagaaatctggtcactcaggttgtagaagggggaccggggccagaattccccattttcaaagtcctgcggtcgtgggcagcgtattgctctgcattccgccttctggacaatcttttggtctcgggtctgcaggtcgctccaggagcctgtggatctgcaggttcgagtctgcacggggtatgggtagaagccagagggacataggtactccagggcctgaccgccttggagaagttgaaaggagccgcctttgatctctactccctccagagagcaggagacttggggccgggcctcaagcactggagttgcgctcacacctccagaggagaagcctaagaccaagaggacgaggcagagctgggggctctccattgtcatggaaagcaccagagagtccagtggcccaaagccctctccaggtcactctgggtgcctatttgacctcctgtccaaactgaaacccaaatgctggatctggctacacccctttcccactgtcccctaaccttttatgcaatctgctctggcatctgcagcctggccagcctaccctgcgcacgcagccactgcttcccggaacattcatgaaggagggccccagctgaactgccaactgaggaaacagaaactatgtgagccccacccttgactgaccaagggccagaacttccctttcaaagctccctcttagcccccagacccctcctaacaagcacagaccaccacctccactacccccaatttaaaagatcagtctttccatggactgtgtgatggagc

SEQ ID NO: 11 - DNA, 2573 bp, Rattus norvegicus
  source 1..2573: mol_type = unassigned DNA
ttttttttttttttttgtatttgtattgtagctgctttaatctgccctcaccctcccagcaggaagctccttataagaaacccaagtcctcgtctttgagcttctcctttagccagggcagcacctggaagagattgatgtggaagtcccgggcataggagggcaccaactgttgccgcctcgggtctttgcagacatccactactccccagctgatcacaccaacttgaatgaagcggcttctcttgtgaacaatgagagggcccccggagtctcctttgcatgtgttggggtcagcatagggatctacccctccggtgcacaggaacctgggggtgaccacctcagaggcaactttgaccttctcatagccttgggcctttgtagcatctctctcacaactggctttcttttccccattcttgatgtacacctccttccgggtcagcttcttcccttcctcggatacaaacagagctttgacgtccttcatagggagcaactcttccttgtgctgtttgcaggtggctgtctgaggaagccgcaaggctcgggtggttccctctgtgcaggggagacagatgggcctgagagtctggctgtacttcagcttggtcttgagcttgatgagggcaacatcatagtcatagaactcagagattccttctgcctttttcccattgatgtcgtaattagggtggaacaggacctcttcaatctccaggtcccgccttttcccctccacgttgaccttgatggagtgtttctgatcttccactgtgaagcaatgcgctgctgtcagcacgaagtactcggacaccacggcccccatacagttctcatgtcctttcagaggacgagtgactgagatcttggcttgccatggttgcttgtaataatcaccgcctttctgatgctcccacaccatgccacagagacccagagatttggtttcatcgatcattttgtagaagacgttctccagatcctccatgtccttgaccttgaacacatgctgctcattgttctttttggaagccaaggcattgatgttcacagggtccaccagaggcccgaccccaaacacatacacatccaaataatcctcccggggatttttgcgatccctgccaatatccagcaagtctcggatgtcctcaatgacagtgacagggtctccacccatgttgtgcaagccatcagtcatgatgatgatgacgtggcgggttcgattccagccttcaggcggagcatcccctggccagctcatcatgctgtatacagcctggagagccttcttggtgttggtccctgacttcagcttgtggtcttcataactgatttggttgagcttctctgtgacccagtcggcatcactactcctctcctcagacactctgaccaagactttggggactgtggcatatgtcactagaccgtatcttggcttcaccccataactcgccaccttctcaatcaagttggcgagacaccgcttggcccctgtgaagttgctggccccgatgctgtcggatccatccagcaccatgtagatattcatggagcccgaggggtccaggataatcttcctcttctgctgttcccctgggctgtgcccatcctccgcatctgctccttcgatggtctctgtcagggaggatagaaatgcttcggccacctcttgagggctgtcgtacatgaaggaatcttggcaggaaggctctgtcccactccacgagccaccttcctggcaccttcgctgctgggagccacgtaggacaagtccccgactacagtggtaagtgacagtgtcttcaagacggtactggcttcccaccttccttgtcccaataggaatacccgggttgggacagtatcccgctccatcatcacagattgctgtttgcccatcccaccggccattctcttggcaggtgcgattagcagagccccggagagtgtagccatcatagcattgaaaagaaatctgatcactcaggttgtagtagggggaccggggccagaactccccattttcaaagtcctgtggtcgtgggcagcgtattgctctgcattctgccttcttgacaatcttttggtcccgggtctggaggacactccaggagcctgtggatttgcaggttcgagtctgcacagggtatgggtagaagccagagggacacaggtactccagggcctgaccgtcttggagaagttggaaggagccgcctttgatctctactccctccagagagcaagagacctggggccgggcctcaagcactggagttgcgctcacacctccggaggagaggcctaagaccaagaggactaagcagagctggggaccctccattgtcatggaaagcccgtggccaaaagccctttccagttcactctgggtggctacttgacttgctgtccagactgaaactccagtgctggatctggctacacccctttcccaccggcccctaaccttttatgcaatctgctctggcacctgcagcctggccaacctaccctgcacagacgctgcttcccggaacattcatgaaggagggcccctgctg

SEQ ID NO: 12 - DNA, 2334 bp, Pan troglodytes
  source 1..2334: mol_type = unassigned DNA
accccttatagaaaacccaaatcctcatcttggagtttctccttcagccagggcagcacttgaaagaggttgatgtgaaagtctcgggcgtgagcaggtacctgcttttgccgcttctggtttttgcagacatccactactccccagctgattacaccaacttgaatgaaacgacttcttttgtgaactatcaaggggccgccagaatcacctctgcaagtattggggtcagcatagggactcactcctccagtacaaaggaaccgaggggtgaccacctctgagatgtccttgactttgtcatagcctggggcatattgagcatctctctcacagctgcctttcttatccccattcttgatgtagacctccttccgagtcagctttttctcctcctcagacacaaacagagctttgatatcctgtgcagggagcagctcttccttttgttgctggcaagtggtagttggaggaagcctcaaagctcgagttgttccctcggtgcaggggagacaaatgggcctgatagtctggccatatttcagcttattcttgagcttgatcagggcaacgtcatagtcataaaattcaggaattcctgctgcttttttcccattaatgttgtagttggggtgaaataggactacttctatctccaggtcccgcttctcccctcctacgctgaccttgattgagtgttccttgtcatccacagtgaaacagtgtgctgctgtcagcacaaagtactcagacaccacagcccccatacagctctcgtgtccctttgaagggcgaatgactgagatcttggcttgccatggttgcttgtggtaatcggtacccttcctgtgttcccaaaccatgccacagagactcagagactggctttcatcaatcatttggtagaaaacatcttccaggttttccatatccttgactttgaacacatgttgctcattgtctttcttggaagccaaagcattgatgttcacttggttcaccaaaggcccgaccccaaacacatagacatccagataatcctcccttgggtttttgcgatccttgccaatgtatagcaagtcccggatctcatcaatgacagtaattgggtccccgcccatgttgtgcaatccatcagtcatgaggatgatgacatggcgggtgcggttccagccttcaggagggatgtcatctggccagctcatcatgctgtacactgcctggagggccttcttggtgttagtccctgacttcaacttgtggtcttcataattgatttcattgagctgcttcgtgacccagtctgcattactgctgtctggatcagacactttgacccaaattttggggtgtgtggcatatgtcactagaccatatcttggcttcacaccataacttgccaccttctcaattaagttgactagacactttttggctcctgtgaagttgctggccccaatgctgtctgatccatctagcaccaggtagatgttcatggagcctgaagggtccaggacgatcttccgcttctgttgttcccctgggccgtgcccatcctcagcatcgactccttctatggtctctgtcagggaagacaggaaagcttcggccacctcttgaggggtgtcgtacatgaaggagtcttggcaagaaggctccgtcccgctccaagagccaccttcctgacacgttcgccgctgggagccacgcagggtaagcccccggctgcagtggtaggtgacgctgtcttcaaggcggtactggctgcccaccttccttgtgccaatggggatgcccgggttggagcagtaccccgctccgttgtcacagatcgctgtctgcccactccaccggccattcacttggcaggtgcgattggcagagccccggagagtgtaaccgtcatagcagtggaaagagatctcatcactcacattgtagtagggagaccggggccagtattccccgttctcgaagtcgtgtggtcttggacagtggattgctctgcactctgccttcctgacagtcttttggacttgagtcttcagggtgctccaggaccccgtagatctgcaggtacgtgtctgcacagggtacgggtagaagccagaaggacacacgtactccagtgcctggccctcttggagaagtcggaaggagccgcctttgatctctaccccctccagagagcaggattcctggggctgggccaaaggccatggagtggtggtcacacctccagacaagaggcccaagatgaagggcatcaggcagagttgggggctgagattgctccccatggcgttggaaggcaggagagaagctgggcctggg

SEQ ID NO: 13 - DNA, 2289 bp, Macaca fascicularis
  source 1..2289: mol_type = unassigned DNA
gagaaaacccaaatcctcatcttggagtttctccttcagccagggcagcacttggaagaggttgacgtgaaagtctcgggcgtgagcaggtacctgcttttgccgcttctggtttttgcagacatccactactccccagctgatgacaccaacttgaataaaacgacttctcttgtgaactatcaaggggccgccagaatcacctctgcaagtattggggtcagcatagggactcactcctccagtacaaaggaaccgaggggtgaccacctcggagatgtccttgactttgtcatagcctggggcatattgagcatctctctcacagctgcctttcttatccccattcttgatgtagacctccttccgagtcagcttcttctcctcctcagacacaaacagagctttgatatcctgtgcagggagcagctcttccttctgttgctggcaagtggtagttggaggaagcctcaaagctcgagttgttccctcggtgcaggggagacaaatgggcctgatagtcgggtcataattcaacttattcttgagcttgatcagggcaacgtcatagtcataaaattcaggaattcctgcttcttttttcccgctaatgttgtagtcggggtgaaataggactttttctatctccaggtcccgcttcttccccacgctgaccttgatcgagtgttccttgtcgtccacagtaaaacaatgtgctgctgtcagcacaaagtactcagacaccacagcccccatacagctctcatgtcccttcgaagggcgagtgactgagatcttggcctgccatggttgcttgtggtaatcggtacccgtcgtgtgttcccaaaccatgccacagagactcagagactggctttcatcaatcatttggaagaaaacgtcttccaggttttccatatccttgactttgaacacatgttgctcattgtctttcttggaagccaaagcattgatgttcacttggtccaccaaaggtccaaccccaaacacatagacatccagataatcctccctcgggtttttacgatccttgccgatgtataacaagtcccggatctcatcaatgacagtaattgggtccccgcccatgttgtgcaatccatcggtcatgaggatgatgacatggcgggtgcggttccagccttcaggagggatgtcctctggccaactcatcatgctgtacactgcctggagggccctcttggtgttagtccctgacttcaacttgtggtcttcataattgatttcactgagcttcttcgtgacccagtctgcattgctgctctcttggtcagacactttgacccaaattctggggtatgtggcatatgtcactagagcatatcttggcttcacaccataacttgccaccttctcaattaagttgactagacactttttggctcctgtgaagttgccggccccaatgctgtctgatccatctagcaccaggtagatgttcatggagcctgaagggtctaggatgatcctccgcttctgttgttcccctgggctgtgcccatcctcggcatcgactccttctatggtctccgtcagggaagacaggaaagcttcggccacctcttgaggggtgtcgtacatgaaggagtcttggcaggaaggctccgtcccgctccaagagccaccttcctgacatgttcgccgctgggagccacgcagggtaagcccccggctgcagtggtaggtgacgctgtcttcaaggcggtaccggctgcccaccttccttgtgccaatggggatgcctgggttggagcagtaccccgctccgttgtcacagatcgctgtctgcccactccaccggccattcacttggcaggtgcgattggcagagccccggagagtgtaaccgtcatagcagtggaaagagatctcatcactcacattgtagtagggagaccggggccggtattccccgttctcgaagtcctgtggtcgtggacagcggattgctctgcactctgccttcttgacagtttttcgatcttgagtctgcagggtgctccaggaccccgtggatctgcaggtacgtgtctgcacagggtacgggtagaagccagaaggacacacgtattccagtgcctggccctcttggagaagtcggaaggagccacctttgatctctaccccctccagagagcaggatccttgaggctgggccgaagacaatggagtggtggtcacacctgcagataagaggcccaagatgaagggcatcaggtagagctgggggctgagactgctccccat

SEQ ID NO: 14 - DNA, 2727 bp, Macaca fascicularis
  source 1..2727: mol_type = unassigned DNA
tgttgtcgcagctgttttaattcaatcccgcgcccctgtccagcaggaaaccccttagagaaaacccaaatcctcatcttggagtttctccttcagccagggcagcacttggaagaggttgacgtgaaagtctcgggcgtgagcaggtacctgcttttgccgcttctggtttttgcagacatccactactccccagctgatgacaccaacttgaatgaaacgacttctcttgtgaactatcaaggggccgccagaatcacctctgcaagtattggggtcagcatagggactcactcctccagtacaaaggaaccgaggggtgaccacctccgagatgtccttgactttgtcatagcctggggcatattgagcatctctctcacagctgcctttcttatccccattcttgatgtagacctccttccgagtcagcttcttctcctcctcagacacaaacagagctttgatatcctgtgcagggagcagctcttccttctgttgctggcaagtggtagttggaggaagcctcaaagctcgagttgttccctcggtacaggggagacaaatgggcctgatagtcgggtcataattcaactttttcttgagcttgatcagggcaacgtcatagtcataaaattcaggaattcctgcttcttttttcccgctaatgttgtagtcggggtgaaataggactttttctatctccaggtcccgcttcttccccacgctgaccttgatcgagtgttccttgtcgtccacagtaaaacaatgtgctgctgtcagcacaaagtactcagacaccacagcccccatacagctctcatgtcccttcgaagggcgagtgactgagatcttggcctgccatggttgcttgtggtaatcggtacccgtcgtgtgttcccaaaccatgccacagagactcagagactggctttcatcaatcatttggaagaaaacgtcttccaggttttccatatccttgactttgaacacatgttgctcattgtctttcttggaagccaaagcattgatgttcacttggtccaccaaaggtccaaccccaaacacatagacatccagataatcctccctcgggtttttgcgatccttgccgatgtataacaagtcccggatctcatcaatgacagtaattgggtccccgcccatgttgtgcaatccatcggtcatgaggatgatgacatggcgggtgcggttccagccttcaggagggatgtcctctggccaactcatcatgctgtacactgcctggagggccctcttggtgttagtccctgacttcaacttgtggtcttcataattgatttcactgagcttcttcgtgacccagtctgcattgctgctctcttggtcagacactttgacccaaattctggggtatgtggcatatgtcactagagcatatcttggcttcacaccataacttgccaccttctcaattaagttgactagacactttttggctcctgtgaagttgccggccccaatgctgtctgatccatctagcaccaggtagatgttcatggagcctgaagggtctaggatgatcctccgcttctgttgttcccctgggctgtgcccatcctcggcatcgactccttctatggtctccgtcagggaagacaggaaagcttcggccacctcttgaggggtgtcgtacatgaaggagtcttggcaggaaggctccgtcccgctccaagagccaccttcctgacacgttcgccgctgggagccacgcagggtaagcccccggctgcagtggtaggtgacgctgtcttcaaggcggtaccggctgcccaccttccttgtgccaatggggatgcctgggttggagcagtaccccgctccgttgtcacagatcgctgtctgcccactccaccggccattcacttggcaggtgcgattggcagagccccggagagtgtaaccgtcatagcagtggaaagagatctcatcactcacattgtagtagggagaccggggccggtattccccgttctcgaagtcctgtggtcgtggacagcggattgctctgcactctgccttcttgacagtttttcgatcttgagtctgcagggtgctccaggaccccgtggatctgcaggtacgtgtctgcacagggtacgggtagaagccagaaggacacacgtattccagtgcctggccctcttggagaagtcggaaggagccacctttgatctctaccccctccagagagcaggatccttgaggctgggccgaagacaatggagtggtggtcacacctgcagataagaggcccaagatgaagggcatcaggtagagctgggggctgagactgctccccatggcgttagaaggcaggagagaagctgggcctggggcaggatggcgtgtcctggcttgttttgcttgtctacttagctcagtgtccaagctgaaactccagacctagacctggtcacattcccttcccctgccccccaccagctcccggccttttatgcaatctgtgttctggcacctgcagcttgccccgcctgtcctaccctcatcactttcccggaacatccaagcgggagggccccgctgagctgccagtcaaggaagcagaaactgcagaagtcccaccctttgctgcccaaggtccaggactctccccttcagtacctccttctggcctcagctcctccccaacaagcccagaccacccacttagggaccagaaat

SEQ ID NO: 15 - protein, 16 aa, unidentified
  REGION 1..16: note = Description of Unknown: RFGF peptide
AAVALLPAVLLALLAP

SEQ ID NO: 16 - protein, 11 aa, unidentified
  REGION 1..11: note = Description of Unknown: RFGF analogue peptide
AALLPVLLAAP

SEQ ID NO: 17 - protein, 13 aa, unidentified
  source 1..13: note = Human immunodeficiency virus
GRKKRRQRRRPPQ

SEQ ID NO: 18 - protein, 16 aa, Drosophila sp.
RQIKIWFQNRRMKWKK

SEQ ID NO: 19 - RNA, 21 nt, synthetic construct
  misc_feature 1..21: note = Description of Artificial Sequence: Synthetic oligonucleotide
  source 1..21: mol_type = other RNA
caaaaagtgtctagtcaactt

SEQ ID NO: 20 - RNA, 21 nt, synthetic construct
  misc_feature 1..21: note = Description of Artificial Sequence: Synthetic oligonucleotide
  source 1..21: mol_type = other RNA
tagtggatgtctgcaaaaact

SEQ ID NO: 21 - RNA, 21 nt, synthetic construct
  misc_feature 1..21: note = Description of Artificial Sequence: Synthetic oligonucleotide
  source 1..21: mol_type = other RNA
gaattcctgaattttatgact

SEQ ID NO: 22 - RNA, 21 nt, synthetic construct
  misc_feature 1..21: note = Description of Artificial Sequence: Synthetic oligonucleotide
  source 1..21: mol_type = other RNA
gccaaaaagtgtctagtcaat

SEQ ID NO: 23 - RNA, 21 nt, synthetic construct
  misc_feature 1..21: note = Description of Artificial Sequence: Synthetic oligonucleotide
  source 1..21: mol_type = other RNA
tcacaagagaagtcgtttcat

SEQ ID NO: 24 - RNA, 21 nt, synthetic construct
  misc_feature 1..21: note = Description of Artificial Sequence: Synthetic oligonucleotide
  source 1..21: mol_type = other RNA
gagccaaaaagtgtctagtct

SEQ ID NO: 25 - RNA, 21 nt, synthetic construct
  misc_feature 1..21: note = Description of Artificial Sequence: Synthetic oligonucleotide
  source 1..21: mol_type = other RNA
ctactacaatgtgagtgatgt

SEQ ID NO: 26 - RNA, 21 nt, synthetic construct
  misc_feature 1..21: note = Description of Artificial Sequence: Synthetic oligonucleotide
  source 1..21: mol_type = other RNA
gaagtcgtttcattcaagttt

SEQ ID NO: 27 - RNA, 21 nt, synthetic construct
  misc_feature 1..21: note = Description of Artificial Sequence: Synthetic oligonucleotide
  source 1..21: mol_type = other RNA
agttcacaagagaagtcgttt

SEQ ID NO: 28 - RNA, 21 nt, synthetic construct
  misc_feature 1..21: note = Description of Artificial Sequence: Synthetic oligonucleotide
  source 1..21: mol_type = other RNA
caactcgagctttgaggcttt

SEQ ID NO: 29 - RNA, 21 nt, synthetic construct
  misc_feature 1..21: note = Description of Artificial Sequence: Synthetic oligonucleotide
  source 1..21: mol_type = other RNA
gtagtggatgtctgcaaaaat

SEQ ID NO: 30 - RNA, 21 nt, synthetic construct
  misc_feature 1..21: note = Description of Artificial Sequence: Synthetic oligonucleotide
  source 1..21: mol_type = other RNA
gaggattatctggatgtctat

SEQ ID NO: 31 - RNA, 21 nt, synthetic construct
  misc_feature 1..21: note = Description of Artificial Sequence: Synthetic oligonucleotide
  source 1..21: mol_type = other RNA
agactccttcatgtacgacat

SEQ ID NO: 32 - RNA, 21 nt, synthetic construct
  misc_feature 1..21: note = Description of Artificial Sequence: Synthetic oligonucleotide
  source 1..21: mol_type = other RNA
cacaagagaagtcgtttcatt

SEQ ID NO: 33 - RNA, 21 nt, synthetic construct
  misc_feature 1..21: note = Description of Artificial Sequence: Synthetic oligonucleotide
  source 1..21: mol_type = other RNA
atagttcacaagagaagtcgt

SEQ ID NO: 34 - RNA, 21 nt, synthetic construct
  misc_feature 1..21: note = Description of Artificial Sequence: Synthetic oligonucleotide
  source 1..21: mol_type = other RNA
agccaaaaagtgtctagtcat

SEQ ID NO: 35 - RNA, 21 nt, synthetic construct
  misc_feature 1..21: note = Description of Artificial Sequence: Synthetic oligonucleotide
  source 1..21: mol_type = other RNA
tgaattaaaacagctgcgact

SEQ ID NO: 36 - RNA, 21 nt, synthetic construct
  misc_feature 1..21: note = Description of Artificial Sequence: Synthetic oligonucleotide
  source 1..21: mol_type = other RNA
agggaacaactcgagctttgt

SEQ ID NO: 37 - RNA, 21 nt, synthetic construct
  misc_feature 1..21: note = Description of Artificial Sequence: Synthetic oligonucleotide
  source 1..21: mol_type = other RNA
gacaaagtcaaggacatctct

SEQ ID NO: 38 - RNA, 21 nt, synthetic construct
  misc_feature 1..21: note = Description of Artificial Sequence: Synthetic oligonucleotide
  source 1..21: mol_type = other RNA
tgatagttcacaagagaagtt

SEQ ID NO: 39 - RNA, 21 nt, synthetic construct
  misc_feature 1..21: note = Description of Artificial Sequence: Synthetic oligonucleotide
  source 1..21: mol_type = other RNA
tgtctagtcaacttaattgat

SEQ ID NO: 40 - RNA, 21 nt, synthetic construct
  misc_feature 1..21: note = Description of Artificial Sequence: Synthetic oligonucleotide
  source 1..21: mol_type = other RNA
gttcacaagagaagtcgtttt

SEQ ID NO: 41 - RNA, 21 nt, synthetic construct
  misc_feature 1..21: note = Description of Artificial Sequence: Synthetic oligonucleotide
  source 1..21: mol_type = other RNA
gacccaattactgtcattgat

SEQ ID NO: 42 - RNA, 21 nt, synthetic construct
  misc_feature 1..21: note = Description of Artificial Sequence: Synthetic oligonucleotide
  source 1..21: mol_type = other RNA
gaattttatgactatgacgtt

SEQ ID NO: 43 - RNA, 21 nt, synthetic construct
  misc_feature 1..21: note = Description of Artificial Sequence: Synthetic oligonucleotide
  source 1..21: mol_type = other RNA
ctggagtttcagcttggacat

SEQ ID NO: 44 - RNA, 21 nt, synthetic construct
  misc_feature 1..21: note = Description of Artificial Sequence: Synthetic oligonucleotide
  source 1..21: mol_type = other RNA
gtgtctagtcaacttaattgt

SEQ ID NO: 45 - RNA, 21 nt, synthetic construct
  misc_feature 1..21: note = Description of Artificial Sequence: Synthetic oligonucleotide
  source 1..21: mol_type = other RNA
ttccaagaaagacaatgagct

SEQ ID NO: 46 - RNA, 21 nt, synthetic construct
  misc_feature 1..21: note = Description of Artificial Sequence: Synthetic oligonucleotide
  source 1..21: mol_type = other RNA
ctgctatgacggttacactct

SEQ ID NO: 47 - RNA, 21 nt, synthetic construct
  misc_feature 1..21: note = Description of Artificial Sequence: Synthetic oligonucleotide
  source 1..21: mol_type = other RNA
agtcaacttaattgagaaggt

SEQ ID NO: 48 - RNA, 21 nt, synthetic construct
  misc_feature 1..21: note = Description of Artificial Sequence: Synthetic oligonucleotide
  source 1..21: mol_type = other RNA
atgtgttcaaagtcaaggatt

SEQ ID NO: 49 - RNA, 21 nt, synthetic construct
  misc_feature 1..21: note = Description of Artificial Sequence: Synthetic oligonucleotide
  source 1..21: mol_type = other RNA
gacagcgatctgtgacaacgt

SEQ ID NO: 50 - RNA, 21 nt, synthetic construct
  misc_feature 1..21: note = Description of Artificial Sequence: Synthetic oligonucleotide
  source 1..21: mol_type = other RNA
ggagccaaaaagtgtctagtt

SEQ ID NO: 51 - RNA, 21 nt, synthetic construct
  misc_feature 1..21: note = Description of Artificial Sequence: Synthetic oligonucleotide
  source 1..21: mol_type = other RNA
gagggaacaactcgagctttt

SEQ ID NO: 52 - RNA, 21 nt, synthetic construct
  misc_feature 1..21: note = Description of Artificial Sequence: Synthetic oligonucleotide
  source 1..21: mol_type = other RNA
actgctatgacggttacactt

SEQ ID NO: 53 - RNA, 21 nt, synthetic construct
  misc_feature 1..21: note = Description of Artificial Sequence: Synthetic oligonucleotide
  source 1..21: mol_type = other RNA
ctctttccactgctatgacgt

SEQ ID NO: 54 - RNA, 21 nt, synthetic construct
  misc_feature 1..21: note = Description of Artificial Sequence: Synthetic oligonucleotide
  source 1..21: mol_type = other RNA
aactcgagctttgaggcttct

SEQ ID NO: 55 - RNA, 21 nt, synthetic construct
  misc_feature 1..21: note = Description of Artificial Sequence: Synthetic oligonucleotide
  source 1..21: mol_type = other RNA
cagacagcgatctgtgacaat

SEQ ID NO: 56 - RNA, 21 nt, synthetic construct
  misc_feature 1..21: note = Description of Artificial Sequence: Synthetic oligonucleotide
  source 1..21: mol_type = other RNA
ccttctggcttctacccgtat

SEQ ID NO: 57 - RNA, 21 nt, synthetic construct
  misc_feature 1..21: note = Description of Artificial Sequence: Synthetic oligonucleotide
  source 1..21: mol_type = other RNA
accatagaaggagtcgatgct

SEQ ID NO: 58 - RNA, 21 nt, synthetic construct
  misc_feature 1..21: note = Description of Artificial Sequence: Synthetic oligonucleotide
  source 1..21: mol_type = other RNA
accaagtgaacatcaatgctt

SEQ ID NO: 59 - RNA, 21 nt, synthetic construct
  misc_feature 1..21: note = Description of Artificial Sequence: Synthetic oligonucleotide
  source 1..21: mol_type = other RNA
tgaaatcaattatgaagacct

SEQ ID NO: 60 - RNA, 21 nt, synthetic construct
  misc_feature 1..21: note = Description of Artificial Sequence: Synthetic oligonucleotide
  source 1..21: mol_type = other RNA
gatagttcacaagagaagtct

SEQ ID NO: 61 - RNA, 21 nt, synthetic construct
  misc_feature 1..21: note = Description of Artificial Sequence: Synthetic oligonucleotide
  source 1..21: mol_type = other RNA
aagggtaccgattaccacaat

SEQ ID NO: 62 - RNA, 21 nt, synthetic construct
  misc_feature 1..21: note = Description of Artificial Sequence: Synthetic oligonucleotide
  source 1..21: mol_type = other RNA
caagactccttcatgtacgat

SEQ ID NO: 63 - RNA, 21 nt, synthetic construct
  misc_feature 1..21: note = Description of Artificial Sequence: Synthetic oligonucleotide
  source 1..21: mol_type = other RNA
ctgactcggaaggaggtctat

SEQ ID NO: 64 - RNA, 21 nt, synthetic construct
  misc_feature 1..21: note = Description of Artificial Sequence: Synthetic oligonucleotide
  source 1..21: mol_type = other RNA
tagttcacaagagaagtcgtt

SEQ ID NO: 65 - RNA, 21 nt, synthetic construct
  misc_feature 1..21: note = Description of Artificial Sequence: Synthetic oligonucleotide
  source 1..21: mol_type = other RNA
gtctgcaaaaaccagaagcgt

SEQ ID NO: 66 - RNA, 21 nt, synthetic construct
  misc_feature 1..21: note = Description of Artificial Sequence: Synthetic oligonucleotide
  source 1..21: mol_type = other RNA
agcgatctgtgacaacggagt

SEQ ID NO: 67 - RNA, 21 nt, synthetic construct
  misc_feature 1..21: note = Description of Artificial Sequence: Synthetic oligonucleotide
  source 1..21: mol_type = other RNA
actcggaaggaggtctacatt

SEQ ID NO: 68 - RNA, 21 nt, synthetic construct
  misc_feature 1..21: note = Description of Artificial Sequence: Synthetic oligonucleotide
  source 1..21: mol_type = other RNA
gactccttcatgtacgacact

SEQ ID NO: 69 - RNA, 21 nt, synthetic construct
  misc_feature 1..21: note = Description of Artificial Sequence: Synthetic oligonucleotide
  source 1..21: mol_type = other RNA
agtcgtttcattcaagttggt

SEQ ID NO: 70 - RNA, 21 nt, synthetic construct
  misc_feature 1..21: note = Description of Artificial Sequence: Synthetic oligonucleotide
  source 1..21: mol_type = other RNA
actcgagctttgaggcttcct

SEQ ID NO: 71 - RNA, 21 nt, synthetic construct
  misc_feature 1..21: note = Description of Artificial Sequence: Synthetic oligonucleotide
  source 1..21: mol_type = other RNA
gaacaactcgagctttgaggt

SEQ ID NO: 72 - RNA, 21 nt, synthetic construct
  misc_feature 1..21: note = Description of Artificial Sequence: Synthetic oligonucleotide
  source 1..21: mol_type = other RNA
tggtgctagatggatcagact

SEQ ID NO: 73 - RNA, 21 nt, synthetic construct
  misc_feature 1..21: note = Description of Artificial Sequence: Synthetic oligonucleotide
  source 1..21: mol_type = other RNA
gtgtcaggaaggtggctcttt

SEQ ID NO: 74 - RNA, 21 nt, synthetic construct
  misc_feature 1..21: note = Description of Artificial Sequence: Synthetic oligonucleotide
  source 1..21: mol_type = other RNA
ctgatggattgcacaacatgt

SEQ ID NO: 75 - RNA, 21 nt, synthetic construct
  misc_feature 1..21: note = Description of Artificial Sequence: Synthetic oligonucleotide
  source 1..21: mol_type = other RNA
cagactatcaggcccatttgt

SEQ ID NO: 76 - RNA, 21 nt, synthetic construct
  misc_feature 1..21: note = Description of Artificial Sequence: Synthetic oligonucleotide
  source 1..21: mol_type = other RNA
gaccatagaaggagtcgatgt

SEQ ID NO: 77 - RNA, 21 nt, synthetic construct
  misc_feature 1..21: note = Description of Artificial Sequence: Synthetic oligonucleotide
  source 1..21: mol_type = other RNA
aggagccaaaaagtgtctagt

SEQ ID NO: 78 - RNA, 21 nt, synthetic construct
  misc_feature 1..21: note = Description of Artificial Sequence: Synthetic oligonucleotide
  source 1..21: mol_type = other RNA
agaccatagaaggagtcgatt

SEQ ID NO: 79 - RNA, 21 nt, synthetic construct
  misc_feature 1..21: note = Description of Artificial Sequence: Synthetic oligonucleotide
  source 1..21: mol_type = other RNA
aagttgaagtcagggactaat

SEQ ID NO: 80 - RNA, 21 nt, synthetic construct
  misc_feature 1..21: note = Description of Artificial Sequence: Synthetic oligonucleotide
  source 1..21: mol_type = other RNA
gagctttgaggcttcctccat

SEQ ID NO: 81 - RNA, 21 nt, synthetic construct
  misc_feature 1..21: note = Description of Artificial Sequence: Synthetic oligonucleotide
  source 1..21: mol_type = other RNA
tcaattatgaagaccacaagt

SEQ ID NO: 82 - RNA, 21 nt, synthetic construct
  misc_feature 1..21: note = Description of Artificial Sequence: Synthetic oligonucleotide
  source 1..21: mol_type = other RNA
aagactccttcatgtacgact

SEQ ID NO: 83 - RNA, 21 nt, synthetic construct
  misc_feature 1..21: note = Description of Artificial Sequence: Synthetic oligonucleotide
  source 1..21: mol_type = other RNA
ctttgaggcttcctccaactt

SEQ ID NO: 84 - RNA, 21 nt, synthetic construct
  misc_feature 1..21: note = Description of Artificial Sequence: Synthetic oligonucleotide
  source 1..21: mol_type = other RNA
aggcttcctccaactaccact

SEQ ID NO: 85 - RNA, 21 nt, synthetic construct
  misc_feature 1..21: note = Description of Artificial Sequence: Synthetic oligonucleotide
  source 1..21: mol_type = other RNA
agacagcgatctgtgacaact

SEQ ID NO: 86 - RNA, 21 nt, synthetic construct
  misc_feature 1..21: note = Description of Artificial Sequence: Synthetic oligonucleotide
  source 1..21: mol_type = other RNA
caggctatgacaaagtcaagt

SEQ ID NO: 87 - RNA, 21 nt, synthetic construct
  misc_feature 1..21: note = Description of Artificial Sequence: Synthetic oligonucleotide
  source 1..21: mol_type = other RNA
gctttgaggcttcctccaact

SEQ ID NO: 88 - RNA, 21 nt, synthetic construct
  misc_feature 1..21: note = Description of Artificial Sequence: Synthetic oligonucleotide
  source 1..21: mol_type = other RNA
tatgactatgacgttgccctt

SEQ ID NO: 89 - RNA, 21 nt, synthetic construct
  misc_feature 1..21: note = Description of Artificial Sequence: Synthetic oligonucleotide
  source 1..21: mol_type = other RNA
tctgcaaaaaccagaagcggt

SEQ ID NO: 90 - RNA, 21 nt, synthetic construct
  misc_feature 1..21: note = Description of Artificial Sequence: Synthetic oligonucleotide
  source 1..21: mol_type = other RNA
tctctttccactgctatgact

SEQ ID NO: 91 - RNA, 21 nt, synthetic construct
  misc_feature 1..21: note = Description of Artificial Sequence: Synthetic oligonucleotide
  source 1..21: mol_type = other RNA
atgacggttacactctccggt

SEQ ID NO: 92 - RNA, 21 nt, synthetic construct
  misc_feature 1..21: note = Description of Artificial Sequence: Synthetic oligonucleotide
  source 1..21: mol_type = other RNA
caagggaggattatctggatt

SEQ ID NO: 93 - RNA, 21 nt, synthetic construct
  misc_feature 1..21: note = Description of Artificial Sequence: Synthetic oligonucleotide
  source 1..21: mol_type = other RNA
cagcgatctgtgacaacggat

SEQ ID NO: 94 - RNA, 21 nt, synthetic construct
  misc_feature 1..21: note = Description of Artificial Sequence: Synthetic oligonucleotide
  source 1..21: mol_type = other RNA
gaggcttcctccaactaccat

SEQ ID NO: 95 - RNA, 21 nt, synthetic construct
  misc_feature 1..21: note = Description of Artificial Sequence: Synthetic oligonucleotide
  source 1..21: mol_type = other RNA
tatgacggttacactctccgt

SEQ ID NO: 96 - RNA, 21 nt, synthetic construct
  misc_feature 1..21: note = Description of Artificial Sequence: Synthetic oligonucleotide
  source 1..21: mol_type = other RNA
aacaactcgagctttgaggct

SEQ ID NO: 97 - RNA, 21 nt, synthetic construct
  misc_feature 1..21: note = Description of Artificial Sequence: Synthetic oligonucleotide
  source 1..21: mol_type = other RNA
tctttccactgctatgacggt

SEQ ID NO: 98 - RNA, 21 nt, synthetic construct
  misc_feature 1..21: note = Description of Artificial Sequence: Synthetic oligonucleotide
  source 1..21: mol_type = other RNA
aacatgtgttcaaagtcaagt

SEQ ID NO: 99 - RNA, 21 nt, synthetic construct
  misc_feature 1..21: note = Description of Artificial Sequence: Synthetic oligonucleotide
  source 1..21: mol_type = other RNA
ccttcaggctccatgaacatt

SEQ ID NO: 100 - RNA, 21 nt, synthetic construct
  misc_feature 1..21: note = Description of Artificial Sequence: Synthetic oligonucleotide
  source 1..21: mol_type = other RNA
gagaagtcgtttcattcaagt

SEQ ID NO: 101 - RNA, 21 nt, synthetic construct
  misc_feature 1..21: note = Description of Artificial Sequence: Synthetic oligonucleotide
  source 1..21: mol_type = other RNA
gggtaccgattaccacaagct

SEQ ID NO: 102 - RNA, 21 nt, synthetic construct
  misc_feature 1..21: note = Description of Artificial Sequence: Synthetic oligonucleotide
  source 1..21: mol_type = other RNA
tgatggattgcacaacatggt

SEQ ID NO: 103 - RNA, 21 nt, synthetic construct
  misc_feature 1..21: note = Description of Artificial Sequence: Synthetic oligonucleotide
  source 1..21: mol_type = other RNA
cgagggaacaactcgagcttt

SEQ ID NO: 104 - RNA, 21 nt, synthetic construct
  misc_feature 1..21: note = Description of Artificial Sequence: Synthetic oligonucleotide
  source 1..21: mol_type = other RNA
tttatgactatgacgttgcct

SEQ ID NO: 105 - RNA, 23 nt, synthetic construct
  misc_feature 1..23: note = Description of Artificial Sequence: Synthetic oligonucleotide
  source 1..23: mol_type = other RNA
aagttgactagacactttttggc

SEQ ID NO: 106 - RNA, 23 nt, synthetic construct
  misc_feature 1..23: note = Description of Artificial Sequence: Synthetic oligonucleotide
  source 1..23: mol_type = other RNA
  modified_base 7: mod_base = OTHER; note = thymine
agtttttgcagacatccactact

SEQ ID NO: 107 - RNA, 23 nt, synthetic construct
  misc_feature 1..23: note = Description of Artificial Sequence: Synthetic oligonucleotide
  source 1..23: mol_type = other RNA
agtcataaaattcaggaattcct

SEQ ID NO: 108 - RNA, 23 nt, synthetic construct
  misc_feature 1..23: note = Description of Artificial Sequence: Synthetic oligonucleotide
  source 1..23: mol_type = other RNA
  modified_base 7: mod_base = OTHER; note = thymine
attgactagacactttttggctc

SEQ ID NO: 109 - RNA, 23 nt, synthetic construct
  misc_feature 1..23: note = Description of Artificial Sequence: Synthetic oligonucleotide
  source 1..23: mol_type = other RNA
atgaaacgacttctcttgtgaac

SEQ ID NO: 110 - RNA, 23 nt, synthetic construct
  misc_feature 1..23: note = Description of Artificial Sequence: Synthetic oligonucleotide
  source 1..23: mol_type = other RNA
agactagacactttttggctcct

SEQ ID NO: 111 - RNA, 23 nt, synthetic construct
  misc_feature 1..23: note = Description of Artificial Sequence: Synthetic oligonucleotide
  source 1..23: mol_type = other RNA
acatcactcacattgtagtaggg

SEQ ID NO: 112 - RNA, 23 nt, synthetic construct
  misc_feature 1..23: note = Description of Artificial Sequence: Synthetic oligonucleotide
  source 1..23: mol_type = other RNA
aaacttgaatgaaacgacttctc

SEQ ID NO: 113 - RNA, 23 nt, synthetic construct
  misc_feature 1..23: note = Description of Artificial Sequence: Synthetic oligonucleotide
  source 1..23: mol_type = other RNA
aaacgacttctcttgtgaactat

SEQ ID NO: 114 - RNA, 23 nt, synthetic construct
  misc_feature 1..23: note = Description of Artificial Sequence: Synthetic oligonucleotide
  source 1..23: mol_type = other RNA
  modified_base 7: mod_base = OTHER; note = thymine
aaagcctcaaagctcgagttgtt

SEQ ID NO: 115 - RNA, 23 nt, synthetic construct
  misc_feature 1..23: note = Description of Artificial Sequence: Synthetic oligonucleotide
  source 1..23: mol_type = other RNA
atttttgcagacatccactactc

SEQ ID NO: 116 - RNA, 23 nt, synthetic construct
  misc_feature 1..23: note = Description of Artificial Sequence: Synthetic oligonucleotide
  source 1..23: mol_type = other RNA
atagacatccagataatcctccc

SEQ ID NO: 117 - RNA, 23 nt, synthetic construct
  misc_feature 1..23: note = Description of Artificial Sequence: Synthetic oligonucleotide
  source 1..23: mol_type = other RNA
  modified_base 7: mod_base = OTHER; note = thymine
atgtcgtacatgaaggagtcttg

SEQ ID NO: 118 - RNA, 23 nt, synthetic construct
  misc_feature 1..23: note = Description of Artificial Sequence: Synthetic oligonucleotide
  source 1..23: mol_type = other RNA
aatgaaacgacttctcttgtgaa

SEQ ID NO: 119 - RNA, 23 nt, synthetic construct
  misc_feature 1..23: note = Description of Artificial Sequence: Synthetic oligonucleotide
  source 1..23: mol_type = other RNA
  modified_base 7: mod_base = OTHER; note = thymine
acgacttctcttgtgaactatca

SEQ ID NO: 120 - RNA, 23 nt, synthetic construct
  misc_feature 1..23: note = Description of Artificial Sequence: Synthetic oligonucleotide
  source 1..23: mol_type = other RNA
atgactagacactttttggctcc

SEQ ID NO: 121 - RNA, 23 nt, synthetic construct
  misc_feature 1..23: note = Description of Artificial Sequence: Synthetic oligonucleotide
  source 1..23: mol_type = other RNA
agtcgcagctgttttaattcaat

SEQ ID NO: 122 - RNA, 23 nt, synthetic construct
  misc_feature 1..23: note = Description of Artificial Sequence: Synthetic oligonucleotide
  source 1..23: mol_type = other RNA
acaaagctcgagttgttccctcg

SEQ ID NO: 123 - RNA, 23 nt, synthetic construct
  misc_feature 1..23: note = Description of Artificial Sequence: Synthetic oligonucleotide
  source 1..23: mol_type = other RNA
agagatgtccttgactttgtcat

SEQ ID NO: 124 - RNA, 23 nt, synthetic construct
  misc_feature 1..23: note = Description of Artificial Sequence: Synthetic oligonucleotide
  source 1..23: mol_type = other RNA
  modified_base 7: mod_base = OTHER; note = thymine
aacttctcttgtgaactatcaag

SEQ ID NO: 125 - RNA, 23 nt, synthetic construct
  misc_feature 1..23: note = Description of Artificial Sequence: Synthetic oligonucleotide
  source 1..23: mol_type = other RNA
  modified_base 7: mod_base = OTHER; note = thymine
atcaattaagttgactagacact

SEQ ID NO: 126 - RNA, 23 nt, synthetic construct
  misc_feature 1..23: note = Description of Artificial Sequence: Synthetic oligonucleotide
  source 1..23: mol_type = other RNA
aaaacgacttctcttgtgaacta

SEQ ID NO: 127 - RNA, 23 nt, synthetic construct
  misc_feature 1..23: note = Description of Artificial Sequence: Synthetic oligonucleotide
  source 1..23: mol_type = other RNA
atcaatgacagtaattgggtccc

SEQ ID NO: 128 - RNA, 23 nt, synthetic construct
  misc_feature 1..23: note = Description of Artificial Sequence: Synthetic oligonucleotide
  source 1..23: mol_type = other RNA
aacgtcatagtcataaaattcag

SEQ ID NO: 129 - RNA, 23 nt, synthetic construct
  misc_feature 1..23: note = Description of Artificial Sequence: Synthetic oligonucleotide
  source 1..23: mol_type = other RNA
atgtccaagctgaaactccagac

SEQ ID NO: 130 - RNA, 23 nt, synthetic construct
  misc_feature 1..23: note = Description of Artificial Sequence: Synthetic oligonucleotide
  source 1..23: mol_type = other RNA
acaattaagttgactagacactt

SEQ ID NO: 131 - RNA, 23 nt, synthetic construct
  misc_feature 1..23: note = Description of Artificial Sequence: Synthetic oligonucleotide
  source 1..23: mol_type = other RNA
  modified_base 7: mod_base = OTHER; note = thymine
agctcattgtctttcttggaagc

SEQ ID NO: 132 - RNA, 23 nt, synthetic construct
  misc_feature 1..23: note = Description of Artificial Sequence: Synthetic oligonucleotide
  source 1..23: mol_type = other RNA
  modified_base 7: mod_base = OTHER; note = thymine
agagtgtaaccgtcatagcagtg

SEQ ID NO: 133 - RNA, 23 nt, synthetic construct
  misc_feature 1..23: note = Description of Artificial Sequence: Synthetic oligonucleotide
  source 1..23: mol_type = other RNA
  modified_base 7: mod_base = OTHER; note = thymine
accttctcaattaagttgactag

SEQ ID NO: 134 - RNA, 23 nt, synthetic construct
  misc_feature 1..23: note = Description of Artificial Sequence: Synthetic oligonucleotide
  source 1..23: mol_type = other RNA
  modified_base 7: mod_base = OTHER; note = thymine
aatccttgactttgaacacatgt

SEQ ID NO: 135 - RNA, 23 nt, synthetic construct
  misc_feature 1..23: note = Description of Artificial Sequence: Synthetic oligonucleotide
  source 1..23: mol_type = other RNA
  modified_base 7: mod_base = OTHER; note = thymine
acgttgtcacagatcgctgtctg

SEQ ID NO: 136 - RNA, 23 nt, synthetic construct
  misc_feature 1..23: note = Description of Artificial Sequence: Synthetic oligonucleotide
  source 1..23: mol_type = other RNA
aactagacactttttggctcctg

SEQ ID NO: 137 - RNA, 23 nt, synthetic construct
  misc_feature 1..23: note = Description of Artificial Sequence: Synthetic oligonucleotide
  source 1..23: mol_type = other RNA
  modified_base 7: mod_base = OTHER; note = thymine
aaaagctcgagttgttccctcgg

SEQ ID NO: 138 - RNA, 23 nt, synthetic construct
  misc_feature 1..23: note = Description of Artificial Sequence: Synthetic oligonucleotide
  source 1..23: mol_type = other RNA
aagtgtaaccgtcatagcagtgg

SEQ ID NO: 139 - RNA, 23 nt, synthetic construct
  misc_feature 1..23: note = Description of Artificial Sequence: Synthetic oligonucleotide
  source 1..23: mol_type = other RNA
  modified_base 7: mod_base = OTHER; note = thymine
acgtcatagcagtggaaagagat

SEQ ID NO: 140 - RNA, 23 nt, synthetic construct
  misc_feature 1..23: note = Description of Artificial Sequence: Synthetic oligonucleotide
  source 1..23: mol_type = other RNA
agaagcctcaaagctcgagttgt

SEQ ID NO: 141 - RNA, 23 nt, synthetic construct
  misc_feature 1..23: note = Description of Artificial Sequence: Synthetic oligonucleotide
  source 1..23: mol_type = other RNA
attgtcacagatcgctgtctgcc

SEQ ID NO: 142 - RNA, 23 nt, synthetic construct
  misc_feature 1..23: note = Description of Artificial Sequence: Synthetic oligonucleotide
  source 1..23: mol_type = other RNA
atacgggtagaagccagaaggac

SEQ ID NO: 143 - RNA, 23 nt, synthetic construct
  misc_feature 1..23: note = Description of Artificial Sequence: Synthetic oligonucleotide
  source 1..23: mol_type = other RNA
agcatcgactccttctatggtct

SEQ ID NO: 144 - RNA, 23 nt, synthetic construct
  misc_feature 1..23: note = Description of Artificial Sequence: Synthetic oligonucleotide
  source 1..23: mol_type = other RNA
  modified_base 7: mod_base = OTHER; note = thymine
aagcattgatgttcacttggttc

SEQ ID NO: 145 - RNA, 23 nt, synthetic construct
  misc_feature 1..23: note = Description of Artificial Sequence: Synthetic oligonucleotide
  source 1..23: mol_type = other RNA
  modified_base 7: mod_base = OTHER; note = thymine
aggtcttcataattgatttcatt

SEQ ID NO: 146 - RNA, 23 nt, synthetic construct
  misc_feature 1..23: note = Description of Artificial Sequence: Synthetic oligonucleotide
  source 1..23: mol_type = other RNA
agacttctcttgtgaactatcaa

SEQ ID NO: 147 - RNA, 23 nt, synthetic construct
  misc_feature 1..23: note = Description of Artificial Sequence: Synthetic oligonucleotide
  source 1..23: mol_type = other RNA
attgtggtaatcggtacccttcc

SEQ ID NO: 148 - RNA, 23 nt, synthetic construct
  misc_feature 1..23: note = Description of Artificial Sequence: Synthetic oligonucleotide
  source 1..23: mol_type = other RNA
atcgtacatgaaggagtcttggc

SEQ ID NO: 149 - RNA, 23 nt, synthetic construct
  misc_feature 1..23: note = Description of Artificial Sequence: Synthetic oligonucleotide
  source 1..23: mol_type = other RNA
atagacctccttccgagtcagct

SEQ ID NO: 150 - RNA, 23 nt, synthetic construct
  misc_feature 1..23: note = Description of Artificial Sequence: Synthetic oligonucleotide
  source 1..23: mol_type = other RNA
  modified_base 7: mod_base = OTHER; note = thymine
aacgacttctcttgtgaactatc

SEQ ID NO: 151 - RNA, 23 nt, synthetic construct
  misc_feature 1..23: note = Description of Artificial Sequence: Synthetic oligonucleotide
  source 1..23: mol_type = other RNA
acgcttctggtttttgcagacat

SEQ ID NO: 152 - RNA, 23 nt, synthetic construct
  misc_feature 1..23: note = Description of Artificial Sequence: Synthetic oligonucleotide
  source 1..23: mol_type = other RNA
  modified_base 7: mod_base = OTHER; note = thymine
actccgttgtcacagatcgctgt

SEQ ID NO: 153 - RNA, 23 nt, synthetic construct
  misc_feature 1..23: note = Description of Artificial Sequence: Synthetic oligonucleotide
  source 1..23: mol_type = other RNA
aatgtagacctccttccgagtca

SEQ ID NO: 154 - RNA, 23 nt, synthetic construct
  misc_feature 1..23: note = Description of Artificial Sequence: Synthetic oligonucleotide
  source 1..23: mol_type = other RNA
agtgtcgtacatgaaggagtctt

SEQ ID NO: 155 - RNA, 23 nt, synthetic construct
  misc_feature 1..23: note = Description of Artificial Sequence: Synthetic oligonucleotide
  source 1..23: mol_type = other RNA
  modified_base 7: mod_base = OTHER; note = thymine
accaacttgaatgaaacgacttc

SEQ ID NO: 156 - RNA, 23 nt, synthetic construct
  misc_feature 1..23: note = Description of Artificial Sequence: Synthetic oligonucleotide
  source 1..23: mol_type = other RNA
aggaagcctcaaagctcgagttg

SEQ ID NO: 157 - RNA, 23 nt, synthetic construct
  misc_feature 1..23: note = Description of Artificial Sequence: Synthetic oligonucleotide
  source 1..23: mol_type = other RNA
acctcaaagctcgagttgttccc

SEQ ID NO: 158 - RNA, 23 nt, synthetic construct
  misc_feature 1..23: note = Description of Artificial Sequence: Synthetic oligonucleotide
  source 1..23: mol_type = other RNA
agtctgatccatctagcaccagg

SEQ ID NO: 159 - RNA, 23 nt, synthetic construct
  misc_feature 1..23: note = Description of Artificial Sequence: Synthetic oligonucleotide
  source 1..23: mol_type = other RNA
aaagagccaccttcctgacacgt

SEQ ID NO: 160 - RNA, 23 nt, synthetic construct
  misc_feature 1..23: note = Description of Artificial Sequence: Synthetic oligonucleotide
  source 1..23: mol_type = other RNA
  modified_base 7: mod_base = OTHER; note = thymine
acatgttgtgcaatccatcagtc

SEQ ID NO: 161 - RNA, 23 nt, synthetic construct
  misc_feature 1..23: note = Description of Artificial Sequence: Synthetic oligonucleotide
  source 1..23: mol_type = other RNA
acaaatgggcctgatagtctggc

SEQ ID NO: 162 - RNA, 23 nt, synthetic construct
  misc_feature 1..23: note = Description of Artificial Sequence: Synthetic oligonucleotide
  source 1..23: mol_type = other RNA
acatcgactccttctatggtctc

SEQ ID NO: 163 - RNA, 23 nt, synthetic construct
  misc_feature 1..23: note = Description of Artificial Sequence: Synthetic oligonucleotide
  source 1..23: mol_type = other RNA
actagacactttttggctcctgt

SEQ ID NO: 164 - RNA, 23 nt, synthetic construct
  misc_feature 1..23: note = Description of Artificial Sequence: Synthetic oligonucleotide
  source 1..23: mol_type = other RNA
aatcgactccttctatggtctct

SEQ ID NO: 165 - RNA, 23 nt, synthetic construct
  misc_feature 1..23: note = Description of Artificial Sequence: Synthetic oligonucleotide
  source 1..23: mol_type = other RNA
attagtccctgacttcaacttgt

SEQ ID NO: 166 - RNA, 23 nt, synthetic construct
  misc_feature 1..23: note = Description of Artificial Sequence: Synthetic oligonucleotide
  source 1..23: mol_type = other RNA
atggaggaagcctcaaagctcga

SEQ ID NO: 167 - RNA, 23 nt, synthetic construct
  misc_feature 1..23: note = Description of Artificial Sequence: Synthetic oligonucleotide
  source 1..23: mol_type = other RNA
acttgtggtcttcataattgatt

SEQ ID NO: 168 - RNA, 23 nt, synthetic construct
  misc_feature 1..23: note = Description of Artificial Sequence: Synthetic oligonucleotide
  source 1..23: mol_type = other RNA
agtcgtacatgaaggagtcttgg

SEQ ID NO: 169 - RNA, 23 nt, synthetic construct
  misc_feature 1..23: note = Description of Artificial Sequence: Synthetic oligonucleotide
  source 1..23: mol_type = other RNA
aagttggaggaagcctcaaagct

SEQ ID NO: 170 - RNA, 23 nt, synthetic construct
  misc_feature 1..23: note = Description of Artificial Sequence: Synthetic oligonucleotide
  source 1..23: mol_type = other RNA
agtggtagttggaggaagcctca

SEQ ID NO: 171 - RNA, 23 nt, synthetic construct
  misc_feature 1..23: note = Description of Artificial Sequence: Synthetic oligonucleotide
  source 1..23: mol_type = other RNA
agttgtcacagatcgctgtctgc

SEQ ID NO: 172 - RNA, 23 nt, synthetic construct
  misc_feature 1..23: note = Description of Artificial Sequence: Synthetic oligonucleotide
  source 1..23: mol_type = other RNA
acttgactttgtcatagcctggg

SEQ ID NO: 173 - RNA, 23 nt, synthetic construct
  misc_feature 1..23: note = Description of Artificial Sequence: Synthetic oligonucleotide
  source 1..23: mol_type = other RNA
agttggaggaagcctcaaagctc

SEQ ID NO: 174 - RNA, 23 nt, synthetic construct
  misc_feature 1..23: note = Description of Artificial Sequence: Synthetic oligonucleotide
  source 1..23: mol_type = other RNA
aagggcaacgtcatagtcataaa

SEQ ID NO: 175 - RNA, 23 nt, synthetic construct
  misc_feature 1..23: note = Description of Artificial Sequence: Synthetic oligonucleotide
  source 1..23: mol_type = other RNA
  modified_base 7: mod_base = OTHER; note = thymine
accgcttctggtttttgcagaca

SEQ ID NO: 176 - RNA, 23 nt, synthetic construct
  misc_feature 1..23: note = Description of Artificial Sequence: Synthetic oligonucleotide
  source 1..23: mol_type = other RNA
agtcatagcagtggaaagagatc

SEQ ID NO: 177 - RNA, 23 nt, synthetic construct
  misc_feature 1..23: note = Description of Artificial Sequence: Synthetic oligonucleotide
  source 1..23: mol_type = other RNA
accggagagtgtaaccgtcatag

SEQ ID NO: 178 - RNA, 23 nt, synthetic construct
  misc_feature 1..23: note = Description of Artificial Sequence: Synthetic oligonucleotide
  source 1..23: mol_type = other RNA
aatccagataatcctcccttggg

SEQ ID NO: 179 - RNA, 23 nt, synthetic construct
  misc_feature 1..23: note = Description of Artificial Sequence: Synthetic oligonucleotide
  source 1..23: mol_type = other RNA
  modified_base 7: mod_base = OTHER; note = thymine
atccgttgtcacagatcgctgtc

SEQ ID NO: 180 - RNA, 23 nt, synthetic construct
  misc_feature 1..23: note = Description of Artificial Sequence: Synthetic oligonucleotide
  source 1..23: mol_type = other RNA
atggtagttggaggaagcctcaa

SEQ ID NO: 181 - RNA, 23 nt, synthetic construct
  misc_feature 1..23: note = Description of Artificial Sequence: Synthetic oligonucleotide
  source 1..23: mol_type = other RNA
acggagagtgtaaccgtcatagc

SEQ ID NO: 182 - RNA, 23 nt, synthetic construct
  misc_feature 1..23: note = Description of Artificial Sequence: Synthetic oligonucleotide
  source 1..23: mol_type = other RNA
agcctcaaagctcgagttgttcc

SEQ ID NO: 183 - RNA, 23 nt, synthetic construct
  misc_feature 1..23: note = Description of Artificial Sequence: Synthetic oligonucleotide
  source 1..23: mol_type = other RNA
accgtcatagcagtggaaagaga

SEQ ID NO: 184 - RNA, 23 nt, synthetic construct
  misc_feature 1..23: note = Description of Artificial Sequence: Synthetic oligonucleotide
  source 1..23: mol_type = other RNA
acttgactttgaacacatgttgc

SEQ ID NO: 185 - RNA, 23 nt, synthetic construct
  misc_feature 1..23: note = Description of Artificial Sequence: Synthetic oligonucleotide
  source 1..23: mol_type = other RNA
aatgttcatggagcctgaagggt

SEQ ID NO: 186 - RNA, 23 nt, synthetic construct
  misc_feature 1..23: note = Description of Artificial Sequence: Synthetic oligonucleotide
  source 1..23: mol_type = other RNA
acttgaatgaaacgacttctctt

SEQ ID NO: 187 - RNA, 23 nt, synthetic construct
  misc_feature 1..23: note = Description of Artificial Sequence: Synthetic oligonucleotide
  source 1..23: mol_type = other RNA
  modified_base 7: mod_base = OTHER; note = thymine
agcttgtggtaatcggtaccctt

SEQ ID NO: 188 - RNA, 23 nt, synthetic construct
  misc_feature 1..23: note = Description of Artificial Sequence: Synthetic oligonucleotide
  source 1..23: mol_type = other RNA
  modified_base 7: mod_base = OTHER; note = thymine
accatgttgtgcaatccatcagt

SEQ ID NO: 189 - RNA, 23 nt, synthetic construct
  misc_feature 1..23: note = Description of Artificial Sequence: Synthetic oligonucleotide
  source 1..23: mol_type = other RNA
aaagctcgagttgttccctcggt

SEQ ID NO: 190 - RNA, 23 nt, synthetic construct
  misc_feature 1..23: note = Description of Artificial Sequence: Synthetic oligonucleotide
  source 1..23: mol_type = other RNA
aggcaacgtcatagtcataaaat

SEQ ID NO: 191 - RNA, 21 nt, synthetic construct
  misc_feature 1..21: note = Description of Artificial Sequence: Synthetic oligonucleotide
  source 1..21: mol_type = other RNA
  modified_base 1: mod_base = OTHER; note = 2'-O-methylcytidine-3'-phosphorothioate
  modified_base 2: mod_base = OTHER; note = 2'-O-methyladenosine-3'-phosphorothioate
  modified_base 3: mod_base = OTHER; note = 2'-O-methyladenosine-3'-phosphate
  modified_base 4: mod_base = OTHER; note = 2'-O-methyladenosine-3'-phosphate
  modified_base 5: mod_base = OTHER; note = 2'-O-methyladenosine-3'-phosphate
  modified_base 6: mod_base = OTHER; note = 2'-O-methyladenosine-3'-phosphate
  modified_base 7: mod_base = OTHER; note = 2'-fluoroguanosine-3'-phosphate
  modified_base 8: mod_base = OTHER; note = 2'-O-methyluridine-3'-phosphate
  modified_base 9: mod_base = OTHER; note = 2'-fluoroguanosine-3'-phosphate
  modified_base 10: mod_base = OTHER; note = 2'-fluorouridine-3'-phosphate
  modified_base 11: mod_base = OTHER; note = 2'-fluorocytidine-3'-phosphate
  modified_base 12: mod_base = OTHER; note = 2'-O-methyluridine-3'-phosphate
  modified_base 13: mod_base = OTHER; note = 2'-O-methyladenosine-3'-phosphate
  modified_base 14: mod_base = OTHER; note = 2'-O-methylguanosine-3'-phosphate
  modified_base 15: mod_base = OTHER; note = 2'-O-methyluridine-3'-phosphate
  modified_base 16: mod_base = OTHER; note = 2'-O-methylcytidine-3'-phosphate
  modified_base 17: mod_base = OTHER; note = 2'-O-methyladenosine-3'-phosphate
  modified_base 18: mod_base = OTHER; note = 2'-O-methyladenosine-3'-phosphate
  modified_base 19: mod_base = OTHER; note = 2'-O-methylcytidine-3'-phosphate
  modified_base 20: mod_base = OTHER; note = 2'-O-methyluridine-3'-phosphate
  modified_base 21: mod_base = OTHER; note = 2'-O-methyluridine-3'-phosphate N-[tris(GalNAc-alkyl)-amidodecanoyl)]-4-hydroxyprolinol (Hyp-(GalNAc-alkyl)3)
caaaaagtgtctagtcaactt

SEQ ID NO: 192 - RNA, 21 nt, synthetic construct
  misc_feature 1..21: note = Description of Artificial Sequence: Synthetic oligonucleotide
  source 1..21: mol_type = other RNA
  modified_base 1: mod_base = OTHER; note = 2'-O-methyluridine-3'-phosphorothioate
  modified_base 2: mod_base = OTHER; note = 2'-O-methyladenosine-3'-phosphorothioate
  modified_base 3: mod_base = OTHER; note = 2'-O-methylguanosine-3'-phosphate
  modified_base 4: mod_base = OTHER; note = 2'-O-methyluridine-3'-phosphate
  modified_base 5: mod_base = OTHER; note = 2'-O-methylguanosine-3'-phosphate
  modified_base 6: mod_base = OTHER; note = 2'-O-methylguanosine-3'-phosphate
  modified_base 7: mod_base = OTHER; note = 2'-fluoroadenosine-3'-phosphate
  modified_base 8: mod_base = OTHER; note = 2'-O-methyluridine-3'-phosphate
  modified_base 9: mod_base = OTHER; note = 2'-fluoroguanosine-3'-phosphate
  modified_base 10: mod_base = OTHER; note = 2'-fluorouridine-3'-phosphate
  modified_base 11: mod_base = OTHER; note = 2'-fluorocytidine-3'-phosphate
  modified_base 12: mod_base = OTHER; note = 2'-O-methyluridine-3'-phosphate
  modified_base 13: mod_base = OTHER; note = 2'-O-methylguanosine-3'-phosphate
  modified_base 14: mod_base = OTHER; note = 2'-O-methylcytidine-3'-phosphate
  modified_base 15: mod_base = OTHER; note = 2'-O-methyladenosine-3'-phosphate
  modified_base 16: mod_base = OTHER; note = 2'-O-methyladenosine-3'-phosphate
  modified_base 17: mod_base = OTHER; note = 2'-O-methyladenosine-3'-phosphate
  modified_base 18: mod_base = OTHER; note = 2'-O-methyladenosine-3'-phosphate
  modified_base 19: mod_base = OTHER; note = 2'-O-methyladenosine-3'-phosphate
  modified_base 20: mod_base = OTHER; note = 2'-O-methylcytidine-3'-phosphate
  modified_base 21: mod_base = OTHER; note = 2'-O-methyluridine-3'-phosphate N-[tris(GalNAc-alkyl)-amidodecanoyl)]-4-hydroxyprolinol (Hyp-(GalNAc-alkyl)3)
tagtggatgtctgcaaaaact

SEQ ID NO: 193 - RNA, 21 nt, synthetic construct
  misc_feature 1..21: note = Description of Artificial Sequence: Synthetic oligonucleotide
  source 1..21: mol_type = other RNA
  modified_base 1: mod_base = OTHER; note = 2'-O-methylguanosine-3'-phosphorothioate
  modified_base 2: mod_base = OTHER; note = 2'-O-methyladenosine-3'-phosphorothioate
  modified_base 3: mod_base = OTHER; note = 2'-O-methyladenosine-3'-phosphate
  modified_base 4: mod_base = OTHER; note = 2'-O-methyluridine-3'-phosphate
  modified_base 5: mod_base = OTHER; note = 2'-O-methyluridine-3'-phosphate
  modified_base 6: mod_base = OTHER; note = 2'-O-methylcytidine-3'-phosphate
  modified_base 7: mod_base = OTHER; note = 2'-fluorocytidine-3'-phosphate
  modified_base 8: mod_base = OTHER; note = 2'-O-methyluridine-3'-phosphate
  modified_base 9: mod_base = OTHER; note = 2'-fluoroguanosine-3'-phosphate
  modified_base 10: mod_base = OTHER; note = 2'-fluoroadenosine-3'-phosphate
  modified_base 11: mod_base = OTHER; note = 2'-fluoroadenosine-3'-phosphate
  modified_base 12: mod_base = OTHER; note = 2'-O-methyluridine-3'-phosphate
  modified_base 13: mod_base = OTHER; note = 2'-O-methyluridine-3'-phosphate
  modified_base 14: mod_base = OTHER; note = 2'-O-methyluridine-3'-phosphate
  modified_base 15: mod_base = OTHER; note = 2'-O-methyluridine-3'-phosphate
  modified_base 16: mod_base = OTHER; note = 2'-O-methyladenosine-3'-phosphate
  modified_base 17: mod_base = OTHER; note = 2'-O-methyluridine-3'-phosphate
  modified_base 18: mod_base = OTHER; note = 2'-O-methylguanosine-3'-phosphate
  modified_base 19: mod_base = OTHER; note = 2'-O-methyladenosine-3'-phosphate
  modified_base 20: mod_base = OTHER; note = 2'-O-methylcytidine-3'-phosphate
  modified_base 21: mod_base = OTHER; note = 2'-O-methyluridine-3'-phosphate N-[tris(GalNAc-alkyl)-amidodecanoyl)]-4-hydroxyprolinol (Hyp-(GalNAc-alkyl)3)
gaattcctgaattttatgact

SEQ ID NO: 194 - RNA, 21 nt, synthetic construct
  misc_feature 1..21: note = Description of Artificial Sequence: Synthetic oligonucleotide
  source 1..21: mol_type = other RNA
  modified_base 1: mod_base = OTHER; note = 2'-O-methylguanosine-3'-phosphorothioate
  modified_base 2: mod_base = OTHER; note = 2'-O-methylcytidine-3'-phosphorothioate
  modified_base 3: mod_base = OTHER; note = 2'-O-methylcytidine-3'-phosphate
  modified_base 4: mod_base = OTHER; note = 2'-O-methyladenosine-3'-phosphate
  modified_base 5: mod_base = OTHER; note = 2'-O-methyladenosine-3'-phosphate
  modified_base 6: mod_base = OTHER; note = 2'-O-methyladenosine-3'-phosphate
  modified_base 7: mod_base = OTHER; note = 2'-fluoroadenosine-3'-phosphate
  modified_base 8: mod_base = OTHER; note = 2'-O-methyladenosine-3'-phosphate
  modified_base 9: mod_base = OTHER; note = 2'-fluoroguanosine-3'-phosphate
  modified_base 10: mod_base = OTHER; note = 2'-fluorouridine-3'-phosphate
  modified_base 11: mod_base = OTHER; note = 2'-fluoroguanosine-3'-phosphate
  modified_base 12: mod_base = OTHER; note = 2'-O-methyluridine-3'-phosphate
  modified_base 13: mod_base = OTHER; note = 2'-O-methylcytidine-3'-phosphate
  modified_base 14: mod_base = OTHER; note = 2'-O-methyluridine-3'-phosphate
  modified_base 15: mod_base = OTHER; note = 2'-O-methyladenosine-3'-phosphate
  modified_base 16: mod_base = OTHER; note = 2'-O-methylguanosine-3'-phosphate
  modified_base 17: mod_base = OTHER; note = 2'-O-methyluridine-3'-phosphate
  modified_base 18: mod_base = OTHER; note = 2'-O-methylcytidine-3'-phosphate
  modified_base 19: mod_base = OTHER; note = 2'-O-methyladenosine-3'-phosphate
  modified_base 20: mod_base = OTHER; note = 2'-O-methyladenosine-3'-phosphate
  modified_base 21: mod_base = OTHER; note = 2'-O-methyluridine-3'-phosphate N-[tris(GalNAc-alkyl)-amidodecanoyl)]-4-hydroxyprolinol (Hyp-(GalNAc-alkyl)3)
gccaaaaagtgtctagtcaat

SEQ ID NO: 195 - RNA, 21 nt, synthetic construct
  misc_feature 1..21: note = Description of Artificial Sequence: Synthetic oligonucleotide
  source 1..21: mol_type = other RNA
  modified_base 1: mod_base = OTHER; note = 2'-O-methyluridine-3'-phosphorothioate
  modified_base 2: mod_base = OTHER; note = 2'-O-methylcytidine-3'-phosphorothioate
  modified_base 3: mod_base = OTHER; note = 2'-O-methyladenosine-3'-phosphate
  modified_base 4: mod_base = OTHER; note = 2'-O-methylcytidine-3'-phosphate
  modified_base 5: mod_base = OTHER; note = 2'-O-methyladenosine-3'-phosphate
  modified_base 6: mod_base = OTHER; note = 2'-O-methyladenosine-3'-phosphate
  modified_base 7: mod_base = OTHER; note = 2'-fluoroguanosine-3'-phosphate
  modified_base 8: mod_base = OTHER; note = 2'-O-methyladenosine-3'-phosphate
  modified_base 9: mod_base = OTHER; note = 2'-fluoroguanosine-3'-phosphate
  modified_base 10: mod_base = OTHER; note = 2'-fluoroadenosine-3'-phosphate
  modified_base 11: mod_base = OTHER; note = 2'-fluoroadenosine-3'-phosphate
  modified_base 12: mod_base = OTHER; note = 2'-O-methylguanosine-3'-phosphate
  modified_base 13: mod_base = OTHER; note = 2'-O-methyluridine-3'-phosphate
  modified_base 14: mod_base = OTHER; note = 2'-O-methylcytidine-3'-phosphate
  modified_base 15: mod_base = OTHER; note = 2'-O-methylguanosine-3'-phosphate
  modified_base 16: mod_base = OTHER; note = 2'-O-methyluridine-3'-phosphate
  modified_base 17: mod_base = OTHER; note = 2'-O-methyluridine-3'-phosphate
  modified_base 18: mod_base = OTHER; note = 2'-O-methyluridine-3'-phosphate
  modified_base 19: mod_base = OTHER; note = 2'-O-methylcytidine-3'-phosphate
  modified_base 20: mod_base = OTHER; note = 2'-O-methyladenosine-3'-phosphate
  modified_base 21: mod_base = OTHER; note = 2'-O-methyluridine-3'-phosphate N-[tris(GalNAc-alkyl)-amidodecanoyl)]-4-hydroxyprolinol (Hyp-(GalNAc-alkyl)3)
tcacaagagaagtcgtttcat

SEQ ID NO: 196 - RNA, 21 nt, synthetic construct
  misc_feature 1..21: note = Description of Artificial Sequence: Synthetic oligonucleotide
  source 1..21: mol_type = other RNA
  modified_base 1: mod_base = OTHER; note = 2'-O-methylguanosine-3'-phosphorothioate
  modified_base 2: mod_base = OTHER; note = 2'-O-methyladenosine-3'-phosphorothioate
  modified_base 3: mod_base = OTHER; note = 2'-O-methylguanosine-3'-phosphate
  modified_base 4: mod_base = OTHER; note = 2'-O-methylcytidine-3'-phosphate
  modified_base 5: mod_base = OTHER; note = 2'-O-methylcytidine-3'-phosphate
  modified_base 6: mod_base = OTHER; note = 2'-O-methyladenosine-3'-phosphate
  modified_base 7: mod_base = OTHER; note = 2'-fluoroadenosine-3'-phosphate
  modified_base 8: mod_base = OTHER; note = 2'-O-methyladenosine-3'-phosphate
  modified_base 9: mod_base = OTHER; note = 2'-fluoroadenosine-3'-phosphate
  modified_base 10: mod_base = OTHER; note = 2'-fluoroadenosine-3'-phosphate
  modified_base 11: mod_base = OTHER; note = 2'-fluoroguanosine-3'-phosphate
  modified_base 12: mod_base = OTHER; note = 2'-O-methyluridine-3'-phosphate
  modified_base 13: mod_base = OTHER; note = 2'-O-methylguanosine-3'-phosphate
  modified_base 14: mod_base = OTHER; note = 2'-O-methyluridine-3'-phosphate
  modified_base 15: mod_base = OTHER; note = 2'-O-methylcytidine-3'-phosphate
  modified_base 16: mod_base = OTHER; note = 2'-O-methyluridine-3'-phosphate
  modified_base 17: mod_base = OTHER; note = 2'-O-methyladenosine-3'-phosphate
  modified_base 18: mod_base = OTHER; note = 2'-O-methylguanosine-3'-phosphate
  modified_base 19: mod_base = OTHER; note = 2'-O-methyluridine-3'-phosphate
  modified_base 20: mod_base = OTHER; note = 2'-O-methylcytidine-3'-phosphate
  modified_base 21: mod_base = OTHER; note = 2'-O-methyluridine-3'-phosphate N-[tris(GalNAc-alkyl)-amidodecanoyl)]-4-hydroxyprolinol (Hyp-(GalNAc-alkyl)3)
gagccaaaaagtgtctagtct

SEQ ID NO: 197 - RNA, 21 nt, synthetic construct
  misc_feature 1..21: note = Description of Artificial Sequence: Synthetic oligonucleotide
  source 1..21: mol_type = other RNA
  modified_base 1: mod_base = OTHER; note = 2'-O-methylcytidine-3'-phosphorothioate
  modified_base 2: mod_base = OTHER; note = 2'-O-methyluridine-3'-phosphorothioate
  modified_base 3: mod_base = OTHER; note = 2'-O-methyladenosine-3'-phosphate
  modified_base 4: mod_base = OTHER; note = 2'-O-methylcytidine-3'-phosphate
  modified_base 5: mod_base = OTHER; note = 2'-O-methyluridine-3'-phosphate
  modified_base 6: mod_base = OTHER; note = 2'-O-methyladenosine-3'-phosphate
  modified_base 7: mod_base = OTHER; note = 2'-fluorocytidine-3'-phosphate
  modified_base 8: mod_base = OTHER; note = 2'-O-methyladenosine-3'-phosphate
  modified_base 9: mod_base = OTHER; note = 2'-fluoroadenosine-3'-phosphate
  modified_base 10: mod_base = OTHER; note = 2'-fluorouridine-3'-phosphate
  modified_base 11: mod_base = OTHER; note = 2'-fluoroguanosine-3'-phosphate
  modified_base 12: mod_base = OTHER; note = 2'-O-methyluridine-3'-phosphate
  modified_base 13: mod_base = OTHER; note = 2'-O-methylguanosine-3'-phosphate
  modified_base 14: mod_base = OTHER; note = 2'-O-methyladenosine-3'-phosphate
  modified_base 15: mod_base = OTHER; note = 2'-O-methylguanosine-3'-phosphate
  modified_base 16: mod_base = OTHER; note = 2'-O-methyluridine-3'-phosphate
  modified_base 17: mod_base = OTHER; note = 2'-O-methylguanosine-3'-phosphate
  modified_base 18: mod_base = OTHER; note = 2'-O-methyladenosine-3'-phosphate
  modified_base 19: mod_base = OTHER; note = 2'-O-methyluridine-3'-phosphate
  modified_base 20: mod_base = OTHER; note = 2'-O-methylguanosine-3'-phosphate
  modified_base 21: mod_base = OTHER; note = 2'-O-methyluridine-3'-phosphate N-[tris(GalNAc-alkyl)-amidodecanoyl)]-4-hydroxyprolinol (Hyp-(GalNAc-alkyl)3)
ctactacaatgtgagtgatgt

SEQ ID NO: 198 - RNA, 21 nt, synthetic construct
  misc_feature 1..21: note = Description of Artificial Sequence: Synthetic oligonucleotide
  source 1..21: mol_type = other RNA
  modified_base 1: mod_base = OTHER; note = 2'-O-methylguanosine-3'-phosphorothioate
  modified_base 2: mod_base = OTHER; note = 2'-O-methyladenosine-3'-phosphorothioate
  modified_base 3: mod_base = OTHER; note = 2'-O-methyladenosine-3'-phosphate
  modified_base 4: mod_base = OTHER; note = 2'-O-methylguanosine-3'-phosphate
  modified_base 5: mod_base = OTHER; note = 2'-O-methyluridine-3'-phosphate
  modified_base 6: mod_base = OTHER; note = 2'-O-methylcytidine-3'-phosphate
  modified_base 7: mod_base = OTHER; note = 2'-fluoroguanosine-3'-phosphate
  modified_base 8: mod_base = OTHER; note = 2'-O-methyluridine-3'-phosphate
  modified_base 9: mod_base = OTHER; note = 2'-fluorouridine-3'-phosphate
  modified_base 10: mod_base = OTHER; note = 2'-fluorouridine-3'-phosphate
  modified_base 11: mod_base = OTHER; note = 2'-fluorocytidine-3'-phosphate
  modified_base 12: mod_base = OTHER; note = 2'-O-methyladenosine-3'-phosphate
  modified_base 13: mod_base = OTHER; note = 2'-O-methyluridine-3'-phosphate
  modified_base 14: mod_base = OTHER; note = 2'-O-methyluridine-3'-phosphate
  modified_base 15: mod_base = OTHER; note = 2'-O-methylcytidine-3'-phosphate
  modified_base 16: mod_base = OTHER; note = 2'-O-methyladenosine-3'-phosphate
  modified_base 17: mod_base = OTHER; note = 2'-O-methyladenosine-3'-phosphate
  modified_base 18: mod_base = OTHER; note = 2'-O-methylguanosine-3'-phosphate
  modified_base 19: mod_base = OTHER; note = 2'-O-methyluridine-3'-phosphate
  modified_base 20: mod_base = OTHER; note = 2'-O-methyluridine-3'-phosphate
  modified_base 21: mod_base = OTHER; note = 2'-O-methyluridine-3'-phosphate N-[tris(GalNAc-alkyl)-amidodecanoyl)]-4-hydroxyprolinol (Hyp-(GalNAc-alkyl)3)
gaagtcgtttcattcaagttt

SEQ ID NO: 199 - RNA, 21 nt, synthetic construct
  misc_feature 1..21: note = Description of Artificial Sequence: Synthetic oligonucleotide
  source 1..21: mol_type = other RNA
  modified_base 1: mod_base = OTHER; note = 2'-O-methyladenosine-3'-phosphorothioate
  modified_base 2: mod_base = OTHER; note = 2'-O-methylguanosine-3'-phosphorothioate
  modified_base 3: mod_base = OTHER; note = 2'-O-methyluridine-3'-phosphate
  modified_base 4: mod_base = OTHER; note = 2'-O-methyluridine-3'-phosphate
  modified_base 5: mod_base = OTHER; note = 2'-O-methylcytidine-3'-phosphate
  modified_base 6: mod_base = OTHER; note = 2'-O-methyladenosine-3'-phosphate
  modified_base 7: mod_base = OTHER; note = 2'-fluorocytidine-3'-phosphate
  modified_base 8: mod_base = OTHER; note = 2'-O-methyladenosine-3'-phosphate
  modified_base 9: mod_base = OTHER; note = 2'-fluoroadenosine-3'-phosphate
  modified_base 10: mod_base = OTHER; note = 2'-fluoroguanosine-3'-phosphate
  modified_base 11: mod_base = OTHER; note = 2'-fluoroadenosine-3'-phosphate
  modified_base 12: mod_base = OTHER; note = 2'-O-methylguanosine-3'-phosphate
  modified_base 13: mod_base = OTHER; note = 2'-O-methyladenosine-3'-phosphate
  modified_base 14: mod_base = OTHER; note = 2'-O-methyladenosine-3'-phosphate
  modified_base 15: mod_base = OTHER; note = 2'-O-methylguanosine-3'-phosphate
  modified_base 16: mod_base = OTHER; note = 2'-O-methyluridine-3'-phosphate
  modified_base 17: mod_base = OTHER; note = 2'-O-methylcytidine-3'-phosphate
  modified_base 18: mod_base = OTHER; note = 2'-O-methylguanosine-3'-phosphate
  modified_base 19: mod_base = OTHER; note = 2'-O-methyluridine-3'-phosphate
  modified_base 20: mod_base = OTHER; note = 2'-O-methyluridine-3'-phosphate
  modified_base 21: mod_base = OTHER; note = 2'-O-methyluridine-3'-phosphate N-[tris(GalNAc-alkyl)-amidodecanoyl)]-4-hydroxyprolinol (Hyp-(GalNAc-alkyl)3)
agttcacaagagaagtcgttt

SEQ ID NO: 200 - RNA, 21 nt, synthetic construct
  misc_feature 1..21: note = Description of Artificial Sequence: Synthetic oligonucleotide
  source 1..21: mol_type = other RNA
  modified_base 1: mod_base = OTHER; note = 2'-O-methylcytidine-3'-phosphorothioate
  modified_base 2: mod_base = OTHER; note = 2'-O-methyladenosine-3'-phosphorothioate
  modified_base 3: mod_base = OTHER; note = 2'-O-methyladenosine-3'-phosphate
  modified_base 4: mod_base = OTHER; note = 2'-O-methylcytidine-3'-phosphate
  modified_base 5: mod_base = OTHER; note = 2'-O-methyluridine-3'-phosphate
  modified_base 6: mod_base = OTHER; note = 2'-O-methylcytidine-3'-phosphate
  modified_base 7: mod_base = OTHER; note = 2'-fluoroguanosine-3'-phosphate
  modified_base 8: mod_base = OTHER; note = 2'-O-methyladenosine-3'-phosphate
  modified_base 9: mod_base = OTHER; note = 2'-fluoroguanosine-3'-phosphate
  modified_base 10: mod_base = OTHER; note = 2'-fluorocytidine-3'-phosphate
  modified_base 11: mod_base = OTHER; note = 2'-fluorouridine-3'-phosphate
  modified_base 12: mod_base = OTHER; note = 2'-O-methyluridine-3'-phosphate
  modified_base 13: mod_base = OTHER; note = 2'-O-methyluridine-3'-phosphate
  modified_base 14: mod_base = OTHER; note = 2'-O-methylguanosine-3'-phosphate
  modified_base 15: mod_base = OTHER; note = 2'-O-methyladenosine-3'-phosphate
  modified_base 16: mod_base = OTHER; note = 2'-O-methylguanosine-3'-phosphate
  modified_base 17: mod_base = OTHER; note = 2'-O-methylguanosine-3'-phosphate
  modified_base 18: mod_base = OTHER; note = 2'-O-methylcytidine-3'-phosphate
  modified_base 19: mod_base = OTHER; note = 2'-O-methyluridine-3'-phosphate
  modified_base 20: mod_base = OTHER; note = 2'-O-methyluridine-3'-phosphate
  modified_base 21: mod_base = OTHER; note = 2'-O-methyluridine-3'-phosphate N-[tris(GalNAc-alkyl)-amidodecanoyl)]-4-hydroxyprolinol (Hyp-(GalNAc-alkyl)3)
caactcgagctttgaggcttt

SEQ ID NO: 201 - RNA, 21 nt, synthetic construct
  misc_feature 1..21: note = Description of Artificial Sequence: Synthetic oligonucleotide
  source 1..21: mol_type = other RNA
  modified_base 1: mod_base = OTHER; note = 2'-O-methylguanosine-3'-phosphorothioate
  modified_base 2: mod_base = OTHER; note = 2'-O-methyluridine-3'-phosphorothioate
  modified_base 3: mod_base = OTHER; note = 2'-O-methyladenosine-3'-phosphate
  modified_base 4: mod_base = OTHER; note = 2'-O-methylguanosine-3'-phosphate
  modified_base 5: mod_base = OTHER; note = 2'-O-methyluridine-3'-phosphate
  modified_base 6: mod_base = OTHER; note = 2'-O-methylguanosine-3'-phosphate
  modified_base 7: mod_base = OTHER; note = 2'-fluoroguanosine-3'-phosphate
  modified_base 8: mod_base = OTHER; note = 2'-O-methyladenosine-3'-phosphate
  modified_base 9: mod_base = OTHER; note = 2'-fluorouridine-3'-phosphate
  modified_base 10: mod_base = OTHER; note = 2'-fluoroguanosine-3'-phosphate
  modified_base 11: mod_base = OTHER; note = 2'-fluorouridine-3'-phosphate
  modified_base 12: mod_base = OTHER; note = 2'-O-methylcytidine-3'-phosphate
  modified_base 13: mod_base = OTHER; note = 2'-O-methyluridine-3'-phosphate
  modified_base 14: mod_base = OTHER; note = 2'-O-methylguanosine-3'-phosphate
  modified_base 15: mod_base = OTHER; note = 2'-O-methylcytidine-3'-phosphate
  modified_base 16: mod_base = OTHER; note = 2'-O-methyladenosine-3'-phosphate
  modified_base 17: mod_base = OTHER; note = 2'-O-methyladenosine-3'-phosphate
  modified_base 18: mod_base = OTHER; note = 2'-O-methyladenosine-3'-phosphate
  modified_base 19: mod_base = OTHER; note = 2'-O-methyladenosine-3'-phosphate
  modified_base 20: mod_base = OTHER; note = 2'-O-methyladenosine-3'-phosphate
  modified_base 21: mod_base = OTHER; note = 2'-O-methyluridine-3'-phosphate N-[tris(GalNAc-alkyl)-amidodecanoyl)]-4-hydroxyprolinol (Hyp-(GalNAc-alkyl)3)
gtagtggatgtctgcaaaaat

SEQ ID NO: 202 - RNA, 21 nt, synthetic construct
  misc_feature 1..21: note = Description of Artificial Sequence: Synthetic oligonucleotide
  source 1..21: mol_type = other RNA
  modified_base 1: mod_base = OTHER; note = 2'-O-methylguanosine-3'-phosphorothioate
  modified_base 2: mod_base = OTHER; note = 2'-O-methyladenosine-3'-phosphorothioate
  modified_base 3: mod_base = OTHER; note = 2'-O-methylguanosine-3'-phosphate
  modified_base 4: mod_base = OTHER; note = 2'-O-methylguanosine-3'-phosphate
  modified_base 5: mod_base = OTHER; note = 2'-O-methyladenosine-3'-phosphate
  modified_base 6: mod_base = OTHER; note = 2'-O-methyluridine-3'-phosphate
  modified_base 7: mod_base = OTHER; note = 2'-fluorouridine-3'-phosphate
  modified_base 8: mod_base = OTHER; note = 2'-O-methyladenosine-3'-phosphate
  modified_base 9: mod_base = OTHER; note = 2'-fluorouridine-3'-phosphate
  modified_base 10: mod_base = OTHER; note = 2'-fluorocytidine-3'-phosphate
  modified_base 11: mod_base = OTHER; note = 2'-fluorouridine-3'-phosphate
  modified_base 12: mod_base = OTHER; note = 2'-O-methylguanosine-3'-phosphate
  modified_base 13: mod_base = OTHER; note = 2'-O-methylguanosine-3'-phosphate
  modified_base 14: mod_base = OTHER; note = 2'-O-methyladenosine-3'-phosphate
  modified_base 15: mod_base = OTHER; note = 2'-O-methyluridine-3'-phosphate
  modified_base 16: mod_base = OTHER; note = 2'-O-methylguanosine-3'-phosphate
  modified_base 17: mod_base = OTHER; note = 2'-O-methyluridine-3'-phosphate
  modified_base 18: mod_base = OTHER; note = 2'-O-methylcytidine-3'-phosphate
  modified_base 19: mod_base = OTHER; note = 2'-O-methyluridine-3'-phosphate
  modified_base 20: mod_base = OTHER; note = 2'-O-methyladenosine-3'-phosphate
  modified_base 21: mod_base = OTHER; note = 2'-O-methyluridine-3'-phosphate N-[tris(GalNAc-alkyl)-amidodecanoyl)]-4-hydroxyprolinol (Hyp-(GalNAc-alkyl)3)
gaggattatctggatgtctat

SEQ ID NO: 203 - RNA, 21 nt, synthetic construct
  misc_feature 1..21: note = Description of Artificial Sequence: Synthetic oligonucleotide
  source 1..21: mol_type = other RNA
  modified_base 1: mod_base = OTHER; note = 2'-O-methyladenosine-3'-phosphorothioate
  modified_base 2: mod_base = OTHER; note = 2'-O-methylguanosine-3'-phosphorothioate
  modified_base 3: mod_base = OTHER; note = 2'-O-methyladenosine-3'-phosphate
  modified_base 4: mod_base = OTHER; note = 2'-O-methylcytidine-3'-phosphate
  modified_base 5: mod_base = OTHER; note = 2'-O-methyluridine-3'-phosphate
  modified_base 6: mod_base = OTHER; note = 2'-O-methylcytidine-3'-phosphate
  modified_base 7: mod_base = OTHER; note = 2'-fluorocytidine-3'-phosphate
  modified_base 8: mod_base = OTHER; note = 2'-O-methyluridine-3'-phosphate
  modified_base 9: mod_base = OTHER; note = 2'-fluorouridine-3'-phosphate
  modified_base 10: mod_base = OTHER; note = 2'-fluorocytidine-3'-phosphate
  modified_base 11: mod_base = OTHER; note = 2'-fluoroadenosine-3'-phosphate
  modified_base 12: mod_base = OTHER; note = 2'-O-methyluridine-3'-phosphate
  modified_base 13: mod_base = OTHER; note = 2'-O-methylguanosine-3'-phosphate
  modified_base 14: mod_base = OTHER; note = 2'-O-methyluridine-3'-phosphate
  modified_base 15: mod_base = OTHER; note = 2'-O-methyladenosine-3'-phosphate
  modified_base 16: mod_base = OTHER; note = 2'-O-methylcytidine-3'-phosphate
  modified_base 17: mod_base = OTHER; note = 2'-O-methylguanosine-3'-phosphate
  modified_base 18: mod_base = OTHER; note = 2'-O-methyladenosine-3'-phosphate
  modified_base 19: mod_base = OTHER; note = 2'-O-methylcytidine-3'-phosphate
  modified_base 20: mod_base = OTHER; note = 2'-O-methyladenosine-3'-phosphate
  modified_base 21: mod_base = OTHER; note = 2'-O-methyluridine-3'-phosphate N-[tris(GalNAc-alkyl)-amidodecanoyl)]-4-hydroxyprolinol (Hyp-(GalNAc-alkyl)3)
agactccttcatgtacgacat

SEQ ID NO: 204 - RNA, 21 nt, synthetic construct
  misc_feature 1..21: note = Description of Artificial Sequence: Synthetic oligonucleotide
  source 1..21: mol_type = other RNA
  modified_base 1: mod_base = OTHER; note = 2'-O-methylcytidine-3'-phosphorothioate
  modified_base 2: mod_base = OTHER; note = 2'-O-methyladenosine-3'-phosphorothioate
  modified_base 3: mod_base = OTHER; note = 2'-O-methylcytidine-3'-phosphate
  modified_base 4: mod_base = OTHER; note = 2'-O-methyladenosine-3'-phosphate
  modified_base 5: mod_base = OTHER; note = 2'-O-methyladenosine-3'-phosphate
  modified_base 6: mod_base = OTHER; note = 2'-O-methylguanosine-3'-phosphate
  modified_base 7: mod_base = OTHER; note = 2'-fluoroadenosine-3'-phosphate
  modified_base 8: mod_base = OTHER; note = 2'-O-methylguanosine-3'-phosphate
  modified_base 9: mod_base = OTHER; note = 2'-fluoroadenosine-3'-phosphate
  modified_base 10: mod_base = OTHER; note = 2'-fluoroadenosine-3'-phosphate
  modified_base 11: mod_base = OTHER; note = 2'-fluoroguanosine-3'-phosphate
  modified_base 12: mod_base = OTHER; note = 2'-O-methyluridine-3'-phosphate
  modified_base 13: mod_base = OTHER; note = 2'-O-methylcytidine-3'-phosphate
  modified_base 14: mod_base = OTHER; note = 2'-O-methylguanosine-3'-phosphate
  modified_base 15: mod_base = OTHER; note = 2'-O-methyluridine-3'-phosphate
  modified_base 16: mod_base = OTHER; note = 2'-O-methyluridine-3'-phosphate
  modified_base 17: mod_base = OTHER; note = 2'-O-methyluridine-3'-phosphate
  modified_base 18: mod_base = OTHER; note = 2'-O-methylcytidine-3'-phosphate
  modified_base 19: mod_base = OTHER; note = 2'-O-methyladenosine-3'-phosphate
  modified_base 20: mod_base = OTHER; note = 2'-O-methyluridine-3'-phosphate
  modified_base 21: mod_base = OTHER; note = 2'-O-methyluridine-3'-phosphate N-[tris(GalNAc-alkyl)-amidodecanoyl)]-4-hydroxyprolinol (Hyp-(GalNAc-alkyl)3)
cacaagagaagtcgtttcatt

SEQ ID NO: 205 - RNA, 21 nt, synthetic construct
  misc_feature 1..21: note = Description of Artificial Sequence: Synthetic oligonucleotide
  source 1..21: mol_type = other RNA
  modified_base 1: mod_base = OTHER; note = 2'-O-methyladenosine-3'-phosphorothioate
  modified_base 2: mod_base = OTHER; note = 2'-O-methyluridine-3'-phosphorothioate
  modified_base 3: mod_base = OTHER; note = 2'-O-methyladenosine-3'-phosphate
  modified_base 4: mod_base = OTHER; note = 2'-O-methylguanosine-3'-phosphate
  modified_base 5: mod_base = OTHER; note = 2'-O-methyluridine-3'-phosphate
  modified_base 6: mod_base = OTHER; note = 2'-O-methyluridine-3'-phosphate
  modified_base 7: mod_base = OTHER; note = 2'-fluorocytidine-3'-phosphate
  modified_base 8: mod_base = OTHER; note = 2'-O-methyladenosine-3'-phosphate
  modified_base 9: mod_base = OTHER; note = 2'-fluorocytidine-3'-phosphate
  modified_base 10: mod_base = OTHER; note = 2'-fluoroadenosine-3'-phosphate
  modified_base 11: mod_base = OTHER; note = 2'-fluoroadenosine-3'-phosphate
  modified_base 12: mod_base = OTHER; note = 2'-O-methylguanosine-3'-phosphate
  modified_base 13: mod_base = OTHER; note = 2'-O-methyladenosine-3'-phosphate
  modified_base 14: mod_base = OTHER; note = 2'-O-methylguanosine-3'-phosphate
  modified_base 15: mod_base = OTHER; note = 2'-O-methyladenosine-3'-phosphate
  modified_base 16: mod_base = OTHER; note = 2'-O-methyladenosine-3'-phosphate
  modified_base 17: mod_base = OTHER; note = 2'-O-methylguanosine-3'-phosphate
  modified_base 18: mod_base = OTHER; note = 2'-O-methyluridine-3'-phosphate
  modified_base 19: mod_base = OTHER; note = 2'-O-methylcytidine-3'-phosphate
  modified_base 20: mod_base = OTHER; note = 2'-O-methylguanosine-3'-phosphate
  modified_base 21: mod_base = OTHER; note = 2'-O-methyluridine-3'-phosphate N-[tris(GalNAc-alkyl)-amidodecanoyl)]-4-hydroxyprolinol (Hyp-(GalNAc-alkyl)3)
atagttcacaagagaagtcgt

SEQ ID NO: 206 - RNA, 21 nt, synthetic construct
  misc_feature 1..21: note = Description of Artificial Sequence: Synthetic oligonucleotide
  source 1..21: mol_type = other RNA
  modified_base 1: mod_base = OTHER; note = 2'-O-methyladenosine-3'-phosphorothioate
  modified_base 2: mod_base = OTHER; note = 2'-O-methylguanosine-3'-phosphorothioate
  modified_base 3: mod_base = OTHER; note = 2'-O-methylcytidine-3'-phosphate
  modified_base 4: mod_base = OTHER; note = 2'-O-methylcytidine-3'-phosphate
  modified_base 5: mod_base = OTHER; note = 2'-O-methyladenosine-3'-phosphate
  modified_base 6: mod_base = OTHER; note = 2'-O-methyladenosine-3'-phosphate
  modified_base 7: mod_base = OTHER; note = 2'-fluoroadenosine-3'-phosphate
  modified_base 8: mod_base = OTHER; note = 2'-O-methyladenosine-3'-phosphate
  modified_base 9: mod_base = OTHER; note = 2'-fluoroadenosine-3'-phosphate
  modified_base 10: mod_base = OTHER; note = 2'-fluoroguanosine-3'-phosphate
  modified_base 11: mod_base = OTHER; note = 2'-fluorouridine-3'-phosphate
  modified_base 12: mod_base = OTHER; note = 2'-O-methylguanosine-3'-phosphate
  modified_base 13: mod_base = OTHER; note = 2'-O-methyluridine-3'-phosphate
  modified_base 14: mod_base = OTHER; note = 2'-O-methylcytidine-3'-phosphate
  modified_base 15: mod_base = OTHER; note = 2'-O-methyluridine-3'-phosphate
  modified_base 16: mod_base = OTHER; note = 2'-O-methyladenosine-3'-phosphate
  modified_base 17: mod_base = OTHER; note = 2'-O-methylguanosine-3'-phosphate
  modified_base 18: mod_base = OTHER; note = 2'-O-methyluridine-3'-phosphate
  modified_base 19: mod_base = OTHER; note = 2'-O-methylcytidine-3'-phosphate
  modified_base 20: mod_base = OTHER; note = 2'-O-methyladenosine-3'-phosphate
  modified_base 21: mod_base = OTHER; note = 2'-O-methyluridine-3'-phosphate N-[tris(GalNAc-alkyl)-amidodecanoyl)]-4-hydroxyprolinol (Hyp-(GalNAc-alkyl)3)
agccaaaaagtgtctagtcat

SEQ ID NO: 207 - RNA, 21 nt, synthetic construct
  misc_feature 1..21: note = Description of Artificial Sequence: Synthetic oligonucleotide
  source 1..21: mol_type = other RNA
  modified_base 1: mod_base = OTHER; note = 2'-O-methyluridine-3'-phosphorothioate
  modified_base 2: mod_base = OTHER; note = 2'-O-methylguanosine-3'-phosphorothioate
  modified_base 3: mod_base = OTHER; note = 2'-O-methyladenosine-3'-phosphate
  modified_base 4: mod_base = OTHER; note = 2'-O-methyladenosine-3'-phosphate
  modified_base 5: mod_base = OTHER; note = 2'-O-methyluridine-3'-phosphate
  modified_base 6: mod_base = OTHER; note = 2'-O-methyluridine-3'-phosphate
  modified_base 7: mod_base = OTHER; note = 2'-fluoroadenosine-3'-phosphate
  modified_base 8: mod_base = OTHER; note = 2'-O-methyladenosine-3'-phosphate
  modified_base 9: mod_base = OTHER; note = 2'-fluoroadenosine-3'-phosphate
  modified_base 10: mod_base = OTHER; note = 2'-fluoroadenosine-3'-phosphate
  modified_base 11: mod_base = OTHER; note = 2'-fluorocytidine-3'-phosphate
  modified_base 12: mod_base = OTHER; note = 2'-O-methyladenosine-3'-phosphate
  modified_base 13: mod_base = OTHER; note = 2'-O-methylguanosine-3'-phosphate
  modified_base 14: mod_base = OTHER; note = 2'-O-methylcytidine-3'-phosphate
  modified_base 15: mod_base = OTHER; note = 2'-O-methyluridine-3'-phosphate
  modified_base 16: mod_base = OTHER; note = 2'-O-methylguanosine-3'-phosphate
  modified_base 17: mod_base = OTHER; note = 2'-O-methylcytidine-3'-phosphate
  modified_base 18: mod_base = OTHER; note = 2'-O-methylguanosine-3'-phosphate
  modified_base 19: mod_base = OTHER; note = 2'-O-methyladenosine-3'-phosphate
  modified_base 20: mod_base = OTHER; note = 2'-O-methylcytidine-3'-phosphate
  modified_base 21: mod_base = OTHER; note = 2'-O-methyluridine-3'-phosphate N-[tris(GalNAc-alkyl)-amidodecanoyl)]-4-hydroxyprolinol (Hyp-(GalNAc-alkyl)3)
tgaattaaaacagctgcgact

SEQ ID NO: 208 - RNA, 21 nt, synthetic construct
  misc_feature 1..21: note = Description of Artificial Sequence: Synthetic oligonucleotide
  source 1..21: mol_type = other RNA
  modified_base 1: mod_base = OTHER; note = 2'-O-methyladenosine-3'-phosphorothioate
  modified_base 2: mod_base = OTHER; note = 2'-O-methylguanosine-3'-phosphorothioate
  modified_base 3: mod_base = OTHER; note = 2'-O-methylguanosine-3'-phosphate
  modified_base 4: mod_base = OTHER; note = 2'-O-methylguanosine-3'-phosphate
  modified_base 5: mod_base = OTHER; note = 2'-O-methyladenosine-3'-phosphate
  modified_base 6: mod_base = OTHER; note = 2'-O-methyladenosine-3'-phosphate
  modified_base 7: mod_base = OTHER; note = 2'-fluorocytidine-3'-phosphate
  modified_base 8: mod_base = OTHER; note = 2'-O-methyladenosine-3'-phosphate
  modified_base 9: mod_base = OTHER; note = 2'-fluoroadenosine-3'-phosphate
  modified_base 10: mod_base = OTHER; note = 2'-fluorocytidine-3'-phosphate
  modified_base 11: mod_base = OTHER; note = 2'-fluorouridine-3'-phosphate
  modified_base 12: mod_base = OTHER; note = 2'-O-methylcytidine-3'-phosphate
  modified_base 13: mod_base = OTHER; note = 2'-O-methylguanosine-3'-phosphate
  modified_base 14: mod_base = OTHER; note = 2'-O-methyladenosine-3'-phosphate
  modified_base 15: mod_base = OTHER; note = 2'-O-methylguanosine-3'-phosphate
  modified_base 16: mod_base = OTHER; note = 2'-O-methylcytidine-3'-phosphate
  modified_base 17: mod_base = OTHER; note = 2'-O-methyluridine-3'-phosphate
  modified_base 18: mod_base = OTHER; note = 2'-O-methyluridine-3'-phosphate
  modified_base 19: mod_base = OTHER; note = 2'-O-methyluridine-3'-phosphate
  modified_base 20: mod_base = OTHER; note = 2'-O-methylguanosine-3'-phosphate
  modified_base 21: mod_base = OTHER; note = 2'-O-methyluridine-3'-phosphate N-[tris(GalNAc-alkyl)-amidodecanoyl)]-4-hydroxyprolinol (Hyp-(GalNAc-alkyl)3)
agggaacaactcgagctttgt

SEQ ID NO: 209 - RNA, 21 nt, synthetic construct
  misc_feature 1..21: note = Description of Artificial Sequence: Synthetic oligonucleotide
  source 1..21: mol_type = other RNA
  modified_base 1: mod_base = OTHER; note = 2'-O-methylguanosine-3'-phosphorothioate
  modified_base 2: mod_base = OTHER; note = 2'-O-methyladenosine-3'-phosphorothioate
  modified_base 3: mod_base = OTHER; note = 2'-O-methylcytidine-3'-phosphate
  modified_base 4: mod_base = OTHER; note = 2'-O-methyladenosine-3'-phosphate
  modified_base 5: mod_base = OTHER; note = 2'-O-methyladenosine-3'-phosphate
  modified_base 6: mod_base = OTHER; note = 2'-O-methyladenosine-3'-phosphate
  modified_base 7: mod_base = OTHER; note = 2'-fluoroguanosine-3'-phosphate
  modified_base 8: mod_base = OTHER; note = 2'-O-methyluridine-3'-phosphate
  modified_base 9: mod_base = OTHER; note = 2'-fluorocytidine-3'-phosphate
  modified_base 10: mod_base = OTHER; note = 2'-fluoroadenosine-3'-phosphate
  modified_base 11: mod_base = OTHER; note = 2'-fluoroadenosine-3'-phosphate
  modified_base 12: mod_base = OTHER; note = 2'-O-methylguanosine-3'-phosphate
  modified_base 13: mod_base = OTHER; note = 2'-O-methylguanosine-3'-phosphate
  modified_base 14: mod_base = OTHER; note = 2'-O-methyladenosine-3'-phosphate
  modified_base 15: mod_base = OTHER; note = 2'-O-methylcytidine-3'-phosphate
  modified_base 16: mod_base = OTHER; note = 2'-O-methyladenosine-3'-phosphate
  modified_base 17: mod_base = OTHER; note = 2'-O-methyluridine-3'-phosphate
  modified_base 18: mod_base = OTHER; note = 2'-O-methylcytidine-3'-phosphate
  modified_base 19: mod_base = OTHER; note = 2'-O-methyluridine-3'-phosphate
  modified_base 20: mod_base = OTHER; note = 2'-O-methylcytidine-3'-phosphate
  modified_base 21: mod_base = OTHER; note = 2'-O-methyluridine-3'-phosphate N-[tris(GalNAc-alkyl)-amidodecanoyl)]-4-hydroxyprolinol (Hyp-(GalNAc-alkyl)3)
gacaaagtcaaggacatctct

SEQ ID NO: 210 - RNA, 21 nt, synthetic construct
  misc_feature 1..21: note = Description of Artificial Sequence: Synthetic oligonucleotide
  source 1..21: mol_type = other RNA
  modified_base 1: mod_base = OTHER; note = 2'-O-methyluridine-3'-phosphorothioate
  modified_base 2: mod_base = OTHER; note = 2'-O-methylguanosine-3'-phosphorothioate
  modified_base 3: mod_base = OTHER; note = 2'-O-methyladenosine-3'-phosphate
  modified_base 4: mod_base = OTHER; note = 2'-O-methyluridine-3'-phosphate
  modified_base 5: mod_base = OTHER; note = 2'-O-methyladenosine-3'-phosphate
  modified_base 6: mod_base = OTHER; note = 2'-O-methylguanosine-3'-phosphate
  modified_base 7: mod_base = OTHER; note = 2'-fluorouridine-3'-phosphate
  modified_base 8: mod_base = OTHER; note = 2'-O-methyluridine-3'-phosphate
  modified_base 9: mod_base = OTHER; note = 2'-fluorocytidine-3'-phosphate
  modified_base 10: mod_base = OTHER; note = 2'-fluoroadenosine-3'-phosphate
  modified_base 11: mod_base = OTHER; note = 2'-fluorocytidine-3'-phosphate
  modified_base 12: mod_base = OTHER; note = 2'-O-methyladenosine-3'-phosphate
  modified_base 13: mod_base = OTHER; note = 2'-O-methyladenosine-3'-phosphate
  modified_base 14: mod_base = OTHER; note = 2'-O-methylguanosine-3'-phosphate
  modified_base 15: mod_base = OTHER; note = 2'-O-methyladenosine-3'-phosphate
  modified_base 16: mod_base = OTHER; note = 2'-O-methylguanosine-3'-phosphate
  modified_base 17: mod_base = OTHER; note = 2'-O-methyladenosine-3'-phosphate
  modified_base 18: mod_base = OTHER; note = 2'-O-methyladenosine-3'-phosphate
  modified_base 19: mod_base = OTHER; note = 2'-O-methylguanosine-3'-phosphate
  modified_base 20: mod_base = OTHER; note = 2'-O-methyluridine-3'-phosphate
  modified_base 21: mod_base = OTHER; note = 2'-O-methyluridine-3'-phosphate N-[tris(GalNAc-alkyl)-amidodecanoyl)]-4-hydroxyprolinol (Hyp-(GalNAc-alkyl)3)
tgatagttcacaagagaagtt

SEQ ID NO: 211 - RNA, 21 nt, synthetic construct
  misc_feature 1..21: note = Description of Artificial Sequence: Synthetic oligonucleotide
  source 1..21: mol_type = other RNA
  modified_base 1: mod_base = OTHER; note = 2'-O-methyluridine-3'-phosphorothioate
  modified_base 2: mod_base = OTHER; note = 2'-O-methylguanosine-3'-phosphorothioate
  modified_base 3: mod_base = OTHER; note = 2'-O-methyluridine-3'-phosphate
  modified_base 4: mod_base = OTHER; note = 2'-O-methylcytidine-3'-phosphate
  modified_base 5: mod_base = OTHER; note = 2'-O-methyluridine-3'-phosphate
  modified_base 6: mod_base = OTHER; note = 2'-O-methyladenosine-3'-phosphate
  modified_base 7: mod_base = OTHER; note = 2'-fluoroguanosine-3'-phosphate
  modified_base 8: mod_base = OTHER; note = 2'-O-methyluridine-3'-phosphate
  modified_base 9: mod_base = OTHER; note = 2'-fluorocytidine-3'-phosphate
  modified_base 10: mod_base = OTHER; note = 2'-fluoroadenosine-3'-phosphate
  modified_base 11: mod_base = OTHER; note = 2'-fluoroadenosine-3'-phosphate
  modified_base 12: mod_base = OTHER; note = 2'-O-methylcytidine-3'-phosphate
  modified_base 13: mod_base = OTHER; note = 2'-O-methyluridine-3'-phosphate
  modified_base 14: mod_base = OTHER; note = 2'-O-methyluridine-3'-phosphate
  modified_base 15: mod_base = OTHER; note = 2'-O-methyladenosine-3'-phosphate
  modified_base 16: mod_base = OTHER; note = 2'-O-methyladenosine-3'-phosphate
  modified_base 17: mod_base = OTHER; note = 2'-O-methyluridine-3'-phosphate
  modified_base 18: mod_base = OTHER; note = 2'-O-methyluridine-3'-phosphate
  modified_base 19: mod_base = OTHER; note = 2'-O-methylguanosine-3'-phosphate
  modified_base 20: mod_base = OTHER; note = 2'-O-methyladenosine-3'-phosphate
  modified_base 21: mod_base = OTHER; note = 2'-O-methyluridine-3'-phosphate N-[tris(GalNAc-alkyl)-amidodecanoyl)]-4-hydroxyprolinol (Hyp-(GalNAc-alkyl)3)
tgtctagtcaacttaattgat

SEQ ID NO: 212 - RNA, 21 nt, synthetic construct
  misc_feature 1..21: note = Description of Artificial Sequence: Synthetic oligonucleotide
  source 1..21: mol_type = other RNA
  modified_base 1: mod_base = OTHER; note = 2'-O-methylguanosine-3'-phosphorothioate
  modified_base 2: mod_base = OTHER; note = 2'-O-methyluridine-3'-phosphorothioate
  modified_base 3: mod_base = OTHER; note = 2'-O-methyluridine-3'-phosphate
  modified_base 4: mod_base = OTHER; note = 2'-O-methylcytidine-3'-phosphate
  modified_base 5: mod_base = OTHER; note = 2'-O-methyladenosine-3'-phosphate
  modified_base 6: mod_base = OTHER; note = 2'-O-methylcytidine-3'-phosphate
  modified_base 7: mod_base = OTHER; note = 2'-fluoroadenosine-3'-phosphate
  modified_base 8: mod_base = OTHER; note = 2'-O-methyladenosine-3'-phosphate
  modified_base 9: mod_base = OTHER; note = 2'-fluoroguanosine-3'-phosphate
  modified_base 10: mod_base = OTHER; note = 2'-fluoroadenosine-3'-phosphate
  modified_base 11: mod_base = OTHER; note = 2'-fluoroguanosine-3'-phosphate
  modified_base 12: mod_base = OTHER; note = 2'-O-methyladenosine-3'-phosphate
  modified_base 13: mod_base = OTHER; note = 2'-O-methyladenosine-3'-phosphate
  modified_base 14: mod_base = OTHER; note = 2'-O-methylguanosine-3'-phosphate
  modified_base 15: mod_base = OTHER; note = 2'-O-methyluridine-3'-phosphate
  modified_base 16: mod_base = OTHER; note = 2'-O-methylcytidine-3'-phosphate
  modified_base 17: mod_base = OTHER; note = 2'-O-methylguanosine-3'-phosphate
  modified_base 18: mod_base = OTHER; note = 2'-O-methyluridine-3'-phosphate
  modified_base 19: mod_base = OTHER; note = 2'-O-methyluridine-3'-phosphate
  modified_base 20: mod_base = OTHER; note = 2'-O-methyluridine-3'-phosphate
  modified_base 21: mod_base = OTHER; note = 2'-O-methyluridine-3'-phosphate N-[tris(GalNAc-alkyl)-amidodecanoyl)]-4-hydroxyprolinol (Hyp-(GalNAc-alkyl)3)
gttcacaagagaagtcgtttt

SEQ ID NO: 213 - RNA, 21 nt, synthetic construct
  misc_feature 1..21: note = Description of Artificial Sequence: Synthetic oligonucleotide
  source 1..21: mol_type = other RNA
  modified_base 1: mod_base = OTHER; note = 2'-O-methylguanosine-3'-phosphorothioate
  modified_base 2: mod_base = OTHER; note = 2'-O-methyladenosine-3'-phosphorothioate
  modified_base 3: mod_base = OTHER; note = 2'-O-methylcytidine-3'-phosphate
  modified_base 4: mod_base = OTHER; note = 2'-O-methylcytidine-3'-phosphate
  modified_base 5: mod_base = OTHER; note = 2'-O-methylcytidine-3'-phosphate
  modified_base 6: mod_base = OTHER; note = 2'-O-methyladenosine-3'-phosphate
  modified_base 7: mod_base = OTHER; note = 2'-fluoroadenosine-3'-phosphate
  modified_base 8: mod_base = OTHER; note = 2'-O-methyluridine-3'-phosphate
  modified_base 9: mod_base = OTHER; note = 2'-fluorouridine-3'-phosphate
  modified_base 10: mod_base = OTHER; note = 2'-fluoroadenosine-3'-phosphate
  modified_base 11: mod_base = OTHER; note = 2'-fluorocytidine-3'-phosphate
  modified_base 12: mod_base = OTHER; note = 2'-O-methyluridine-3'-phosphate
  modified_base 13: mod_base = OTHER; note = 2'-O-methylguanosine-3'-phosphate
  modified_base 14: mod_base = OTHER; note = 2'-O-methyluridine-3'-phosphate
  modified_base 15: mod_base = OTHER; note = 2'-O-methylcytidine-3'-phosphate
  modified_base 16: mod_base = OTHER; note = 2'-O-methyladenosine-3'-phosphate
  modified_base 17: mod_base = OTHER; note = 2'-O-methyluridine-3'-phosphate
  modified_base 18: mod_base = OTHER; note = 2'-O-methyluridine-3'-phosphate
  modified_base 19: mod_base = OTHER; note = 2'-O-methylguanosine-3'-phosphate
  modified_base 20: mod_base = OTHER; note = 2'-O-methyladenosine-3'-phosphate
  modified_base 21: mod_base = OTHER; note = 2'-O-methyluridine-3'-phosphate N-[tris(GalNAc-alkyl)-amidodecanoyl)]-4-hydroxyprolinol (Hyp-(GalNAc-alkyl)3)
gacccaattactgtcattgat

SEQ ID NO: 214 - RNA, 21 nt, synthetic construct
  misc_feature 1..21: note = Description of Artificial Sequence: Synthetic oligonucleotide
  source 1..21: mol_type = other RNA
  modified_base 1: mod_base = OTHER; note = 2'-O-methylguanosine-3'-phosphorothioate
  modified_base 2: mod_base = OTHER; note = 2'-O-methyladenosine-3'-phosphorothioate
  modified_base 3: mod_base = OTHER; note = 2'-O-methyladenosine-3'-phosphate
  modified_base 4: mod_base = OTHER; note = 2'-O-methyluridine-3'-phosphate
  modified_base 5: mod_base = OTHER; note = 2'-O-methyluridine-3'-phosphate
  modified_base 6: mod_base = OTHER; note = 2'-O-methyluridine-3'-phosphate
  modified_base 7: mod_base = OTHER; note = 2'-fluorouridine-3'-phosphate
  modified_base 8: mod_base = OTHER; note = 2'-O-methyladenosine-3'-phosphate
  modified_base 9: mod_base = OTHER; note = 2'-fluorouridine-3'-phosphate
  modified_base 10: mod_base = OTHER; note = 2'-fluoroguanosine-3'-phosphate
  modified_base 11: mod_base = OTHER; note = 2'-fluoroadenosine-3'-phosphate
  modified_base 12: mod_base = OTHER; note = 2'-O-methylcytidine-3'-phosphate
  modified_base 13: mod_base = OTHER; note = 2'-O-methyluridine-3'-phosphate
  modified_base 14: mod_base = OTHER; note = 2'-O-methyladenosine-3'-phosphate
  modified_base 15: mod_base = OTHER; note = 2'-O-methyluridine-3'-phosphate
  modified_base 16: mod_base = OTHER; note = 2'-O-methylguanosine-3'-phosphate
  modified_base 17: mod_base = OTHER; note = 2'-O-methyladenosine-3'-phosphate
  modified_base 18: mod_base = OTHER; note = 2'-O-methylcytidine-3'-phosphate
  modified_base 19: mod_base = OTHER; note = 2'-O-methylguanosine-3'-phosphate
  modified_base 20: mod_base = OTHER; note = 2'-O-methyluridine-3'-phosphate
  modified_base 21: mod_base = OTHER; note = 2'-O-methyluridine-3'-phosphate N-[tris(GalNAc-alkyl)-amidodecanoyl)]-4-hydroxyprolinol (Hyp-(GalNAc-alkyl)3)
gaattttatgactatgacgtt

SEQ ID NO: 215 - RNA, 21 nt, synthetic construct
  misc_feature 1..21: note = Description of Artificial Sequence: Synthetic oligonucleotide
  source 1..21: mol_type = other RNA
  modified_base 1: mod_base = OTHER; note = 2'-O-methylcytidine-3'-phosphorothioate
  modified_base 2: mod_base = OTHER; note = 2'-O-methyluridine-3'-phosphorothioate
  modified_base 3: mod_base = OTHER; note = 2'-O-methylguanosine-3'-phosphate
  modified_base 4: mod_base = OTHER; note = 2'-O-methylguanosine-3'-phosphate
  modified_base 5: mod_base = OTHER; note = 2'-O-methyladenosine-3'-phosphate
  modified_base 6: mod_base = OTHER; note = 2'-O-methylguanosine-3'-phosphate
  modified_base 7: mod_base = OTHER; note = 2'-fluorouridine-3'-phosphate
  modified_base 8: mod_base = OTHER; note = 2'-O-methyluridine-3'-phosphate
  modified_base 9: mod_base = OTHER; note = 2'-fluorouridine-3'-phosphate
  modified_base 10: mod_base = OTHER; note = 2'-fluorocytidine-3'-phosphate
  modified_base 11: mod_base = OTHER; note = 2'-fluoroadenosine-3'-phosphate
  modified_base 12: mod_base = OTHER; note = 2'-O-methylguanosine-3'-phosphate
  modified_base 13: mod_base = OTHER; note = 2'-O-methylcytidine-3'-phosphate
  modified_base 14: mod_base = OTHER; note = 2'-O-methyluridine-3'-phosphate
  modified_base 15: mod_base = OTHER; note = 2'-O-methyluridine-3'-phosphate
  modified_base 16: mod_base = OTHER; note = 2'-O-methylguanosine-3'-phosphate
  modified_base 17: mod_base = OTHER; note = 2'-O-methylguanosine-3'-phosphate
  modified_base 18: mod_base = OTHER; note = 2'-O-methyladenosine-3'-phosphate
  modified_base 19: mod_base = OTHER; note = 2'-O-methylcytidine-3'-phosphate
  modified_base 20: mod_base = OTHER; note = 2'-O-methyladenosine-3'-phosphate
  modified_base 21: mod_base = OTHER; note = 2'-O-methyluridine-3'-phosphate N-[tris(GalNAc-alkyl)-amidodecanoyl)]-4-hydroxyprolinol (Hyp-(GalNAc-alkyl)3)
ctggagtttcagcttggacat

SEQ ID NO: 216 - RNA, 21 nt, synthetic construct
  misc_feature 1..21: note = Description of Artificial Sequence: Synthetic oligonucleotide
  source 1..21: mol_type = other RNA
  modified_base 1: mod_base = OTHER; note = 2'-O-methylguanosine-3'-phosphorothioate
  modified_base 2: mod_base = OTHER; note = 2'-O-methyluridine-3'-phosphorothioate
  modified_base 3: mod_base = OTHER; note = 2'-O-methylguanosine-3'-phosphate
  modified_base 4: mod_base = OTHER; note = 2'-O-methyluridine-3'-phosphate
  modified_base 5: mod_base = OTHER; note = 2'-O-methylcytidine-3'-phosphate
  modified_base 6: mod_base = OTHER; note = 2'-O-methyluridine-3'-phosphate
  modified_base 7: mod_base = OTHER; note = 2'-fluoroadenosine-3'-phosphate
  modified_base 8: mod_base = OTHER; note = 2'-O-methylguanosine-3'-phosphate
  modified_base 9: mod_base = OTHER; note = 2'-fluorouridine-3'-phosphate
  modified_base 10: mod_base = OTHER; note = 2'-fluorocytidine-3'-phosphate
  modified_base 11: mod_base = OTHER; note = 2'-fluoroadenosine-3'-phosphate
  modified_base 12: mod_base = OTHER; note = 2'-O-methyladenosine-3'-phosphate
  modified_base 13: mod_base = OTHER; note = 2'-O-methylcytidine-3'-phosphate
  modified_base 14: mod_base = OTHER; note = 2'-O-methyluridine-3'-phosphate
  modified_base 15: mod_base = OTHER; note = 2'-O-methyluridine-3'-phosphate
  modified_base 16: mod_base = OTHER; note = 2'-O-methyladenosine-3'-phosphate
  modified_base 17: mod_base = OTHER; note = 2'-O-methyladenosine-3'-phosphate
  modified_base 18: mod_base = OTHER; note = 2'-O-methyluridine-3'-phosphate
  modified_base 19: mod_base = OTHER; note = 2'-O-methyluridine-3'-phosphate
  modified_base 20: mod_base = OTHER; note = 2'-O-methylguanosine-3'-phosphate
  modified_base 21: mod_base = OTHER; note = 2'-O-methyluridine-3'-phosphate N-[tris(GalNAc-alkyl)-amidodecanoyl)]-4-hydroxyprolinol (Hyp-(GalNAc-alkyl)3)
gtgtctagtcaacttaattgt

SEQ ID NO: 217 - RNA, 21 nt, synthetic construct
  misc_feature 1..21: note = Description of Artificial Sequence: Synthetic oligonucleotide
  source 1..21: mol_type = other RNA
  modified_base 1: mod_base = OTHER; note = 2'-O-methyluridine-3'-phosphorothioate
  modified_base 2: mod_base = OTHER; note = 2'-O-methyluridine-3'-phosphorothioate
  modified_base 3: mod_base = OTHER; note = 2'-O-methylcytidine-3'-phosphate
  modified_base 4: mod_base = OTHER; note = 2'-O-methylcytidine-3'-phosphate
  modified_base 5: mod_base = OTHER; note = 2'-O-methyladenosine-3'-phosphate
  modified_base 6: mod_base = OTHER; note = 2'-O-methyladenosine-3'-phosphate
  modified_base 7: mod_base = OTHER; note = 2'-fluoroguanosine-3'-phosphate
  modified_base 8: mod_base = OTHER; note = 2'-O-methyladenosine-3'-phosphate
  modified_base 9: mod_base = OTHER; note = 2'-fluoroadenosine-3'-phosphate
  modified_base 10: mod_base = OTHER; note = 2'-fluoroadenosine-3'-phosphate
  modified_base 11: mod_base = OTHER; note = 2'-fluoroguanosine-3'-phosphate
  modified_base 12: mod_base = OTHER; note = 2'-O-methyladenosine-3'-phosphate
  modified_base 13: mod_base = OTHER; note = 2'-O-methylcytidine-3'-phosphate
  modified_base 14: mod_base = OTHER; note = 2'-O-methyladenosine-3'-phosphate
  modified_base 15: mod_base = OTHER; note = 2'-O-methyladenosine-3'-phosphate
  modified_base 16: mod_base = OTHER; note = 2'-O-methyluridine-3'-phosphate
  modified_base 17: mod_base = OTHER; note = 2'-O-methylguanosine-3'-phosphate
  modified_base 18: mod_base = OTHER; note = 2'-O-methyladenosine-3'-phosphate
  modified_base 19: mod_base = OTHER; note = 2'-O-methylguanosine-3'-phosphate
  modified_base 20: mod_base = OTHER; note = 2'-O-methylcytidine-3'-phosphate
  modified_base 21: mod_base = OTHER; note = 2'-O-methyluridine-3'-phosphate N-[tris(GalNAc-alkyl)-amidodecanoyl)]-4-hydroxyprolinol (Hyp-(GalNAc-alkyl)3)
ttccaagaaagacaatgagct

SEQ ID NO: 218 - RNA, 21 nt, synthetic construct
  misc_feature 1..21: note = Description of Artificial Sequence: Synthetic oligonucleotide
  source 1..21: mol_type = other RNA
  modified_base 1: mod_base = OTHER; note = 2'-O-methylcytidine-3'-phosphorothioate
  modified_base 2: mod_base = OTHER; note = 2'-O-methyluridine-3'-phosphorothioate
  modified_base 3: mod_base = OTHER; note = 2'-O-methylguanosine-3'-phosphate
  modified_base 4: mod_base = OTHER; note = 2'-O-methylcytidine-3'-phosphate
  modified_base 5: mod_base = OTHER; note = 2'-O-methyluridine-3'-phosphate
  modified_base 6: mod_base = OTHER; note = 2'-O-methyladenosine-3'-phosphate
  modified_base 7: mod_base = OTHER; note = 2'-fluorouridine-3'-phosphate
  modified_base 8: mod_base = OTHER; note = 2'-O-methylguanosine-3'-phosphate
  modified_base 9: mod_base = OTHER; note = 2'-fluoroadenosine-3'-phosphate
  modified_base 10: mod_base = OTHER; note = 2'-fluorocytidine-3'-phosphate
  modified_base 11: mod_base = OTHER; note = 2'-fluoroguanosine-3'-phosphate
  modified_base 12: mod_base = OTHER; note = 2'-O-methylguanosine-3'-phosphate
  modified_base 13: mod_base = OTHER; note = 2'-O-methyluridine-3'-phosphate
  modified_base 14: mod_base = OTHER; note = 2'-O-methyluridine-3'-phosphate
  modified_base 15: mod_base = OTHER; note = 2'-O-methyladenosine-3'-phosphate
  modified_base 16: mod_base = OTHER; note = 2'-O-methylcytidine-3'-phosphate
  modified_base 17: mod_base = OTHER; note = 2'-O-methyladenosine-3'-phosphate
  modified_base 18: mod_base = OTHER; note = 2'-O-methylcytidine-3'-phosphate
  modified_base 19: mod_base = OTHER; note = 2'-O-methyluridine-3'-phosphate
  modified_base 20: mod_base = OTHER; note = 2'-O-methylcytidine-3'-phosphate
  modified_base 21: mod_base = OTHER; note = 2'-O-methyluridine-3'-phosphate N-[tris(GalNAc-alkyl)-amidodecanoyl)]-4-hydroxyprolinol (Hyp-(GalNAc-alkyl)3)
ctgctatgacggttacactct

SEQ ID NO: 219 - RNA, 21 nt, synthetic construct
  misc_feature 1..21: note = Description of Artificial Sequence: Synthetic oligonucleotide
  source 1..21: mol_type = other RNA
  modified_base 1: mod_base = OTHER; note = 2'-O-methyladenosine-3'-phosphorothioate
  modified_base 2: mod_base = OTHER; note = 2'-O-methylguanosine-3'-phosphorothioate
  modified_base 3: mod_base = OTHER; note = 2'-O-methyluridine-3'-phosphate
  modified_base 4: mod_base = OTHER; note = 2'-O-methylcytidine-3'-phosphate
  modified_base 5: mod_base = OTHER; note = 2'-O-methyladenosine-3'-phosphate
  modified_base 6: mod_base = OTHER; note = 2'-O-methyladenosine-3'-phosphate
  modified_base 7: mod_base = OTHER; note = 2'-fluorocytidine-3'-phosphate
  modified_base 8: mod_base = OTHER; note = 2'-O-methyluridine-3'-phosphate
  modified_base 9: mod_base = OTHER; note = 2'-fluorouridine-3'-phosphate
  modified_base 10: mod_base = OTHER; note = 2'-fluoroadenosine-3'-phosphate
  modified_base 11: mod_base = OTHER; note = 2'-fluoroadenosine-3'-phosphate
  modified_base 12: mod_base = OTHER; note = 2'-O-methyluridine-3'-phosphate
  modified_base 13: mod_base = OTHER; note = 2'-O-methyluridine-3'-phosphate
  modified_base 14: mod_base = OTHER; note = 2'-O-methylguanosine-3'-phosphate
  modified_base 15: mod_base = OTHER; note = 2'-O-methyladenosine-3'-phosphate
  modified_base 16: mod_base = OTHER; note = 2'-O-methylguanosine-3'-phosphate
  modified_base 17: mod_base = OTHER; note = 2'-O-methyladenosine-3'-phosphate
  modified_base 18: mod_base = OTHER; note = 2'-O-methyladenosine-3'-phosphate
  modified_base 19: mod_base = OTHER; note = 2'-O-methylguanosine-3'-phosphate
  modified_base 20: mod_base = OTHER; note = 2'-O-methylguanosine-3'-phosphate
  modified_base 21: mod_base = OTHER; note = 2'-O-methyluridine-3'-phosphate N-[tris(GalNAc-alkyl)-amidodecanoyl)]-4-hydroxyprolinol (Hyp-(GalNAc-alkyl)3)
agtcaacttaattgagaaggt

SEQ ID NO: 220 - RNA, 21 nt, synthetic construct
  misc_feature 1..21: note = Description of Artificial Sequence: Synthetic oligonucleotide
  source 1..21: mol_type = other RNA
  modified_base 1: mod_base = OTHER; note = 2'-O-methyladenosine-3'-phosphorothioate
  modified_base 2: mod_base = OTHER; note = 2'-O-methyluridine-3'-phosphorothioate
  modified_base 3: mod_base = OTHER; note = 2'-O-methylguanosine-3'-phosphate
  modified_base 4: mod_base = OTHER; note = 2'-O-methyluridine-3'-phosphate
  modified_base 5: mod_base = OTHER; note = 2'-O-methylguanosine-3'-phosphate
  modified_base 6: mod_base = OTHER; note = 2'-O-methyluridine-3'-phosphate
  modified_base 7: mod_base = OTHER; note = 2'-fluorouridine-3'-phosphate
  modified_base 8: mod_base = OTHER; note = 2'-O-methylcytidine-3'-phosphate
  modified_base 9: mod_base = OTHER; note = 2'-fluoroadenosine-3'-phosphate
  modified_base 10: mod_base = OTHER; note = 2'-fluoroadenosine-3'-phosphate
  modified_base 11: mod_base = OTHER; note = 2'-fluoroadenosine-3'-phosphate
  modified_base 12: mod_base = OTHER; note = 2'-O-methylguanosine-3'-phosphate
  modified_base 13: mod_base = OTHER; note = 2'-O-methyluridine-3'-phosphate
  modified_base 14: mod_base = OTHER; note = 2'-O-methylcytidine-3'-phosphate
  modified_base 15: mod_base = OTHER; note = 2'-O-methyladenosine-3'-phosphate
  modified_base 16: mod_base = OTHER; note = 2'-O-methyladenosine-3'-phosphate
  modified_base 17: mod_base = OTHER; note = 2'-O-methylguanosine-3'-phosphate
  modified_base 18: mod_base = OTHER; note = 2'-O-methylguanosine-3'-phosphate
  modified_base 19: mod_base = OTHER; note = 2'-O-methyladenosine-3'-phosphate
  modified_base 20: mod_base = OTHER; note = 2'-O-methyluridine-3'-phosphate
  modified_base 21: mod_base = OTHER; note = 2'-O-methyluridine-3'-phosphate N-[tris(GalNAc-alkyl)-amidodecanoyl)]-4-hydroxyprolinol (Hyp-(GalNAc-alkyl)3)
atgtgttcaaagtcaaggatt

SEQ ID NO: 221 - RNA, 21 nt, synthetic construct
  misc_feature 1..21: note = Description of Artificial Sequence: Synthetic oligonucleotide
  source 1..21: mol_type = other RNA
  modified_base 1: mod_base = OTHER; note = 2'-O-methylguanosine-3'-phosphorothioate
  modified_base 2: mod_base = OTHER; note = 2'-O-methyladenosine-3'-phosphorothioate
  modified_base 3: mod_base = OTHER; note = 2'-O-methylcytidine-3'-phosphate
  modified_base 4: mod_base = OTHER; note = 2'-O-methyladenosine-3'-phosphate
  modified_base 5: mod_base = OTHER; note = 2'-O-methylguanosine-3'-phosphate
  modified_base 6: mod_base = OTHER; note = 2'-O-methylcytidine-3'-phosphate
  modified_base 7: mod_base = OTHER; note = 2'-fluoroguanosine-3'-phosphate
  modified_base 8: mod_base = OTHER; note = 2'-O-methyladenosine-3'-phosphate
  modified_base 9: mod_base = OTHER; note = 2'-fluorouridine-3'-phosphate
  modified_base 10: mod_base = OTHER; note = 2'-fluorocytidine-3'-phosphate
  modified_base 11: mod_base = OTHER; note = 2'-fluorouridine-3'-phosphate
  modified_base 12: mod_base = OTHER; note = 2'-O-methylguanosine-3'-phosphate
  modified_base 13: mod_base = OTHER; note = 2'-O-methyluridine-3'-phosphate
  modified_base 14: mod_base = OTHER; note = 2'-O-methylguanosine-3'-phosphate
  modified_base 15: mod_base = OTHER; note = 2'-O-methyladenosine-3'-phosphate
  modified_base 16: mod_base = OTHER; note = 2'-O-methylcytidine-3'-phosphate
  modified_base 17: mod_base = OTHER; note = 2'-O-methyladenosine-3'-phosphate
  modified_base 18: mod_base = OTHER; note = 2'-O-methyladenosine-3'-phosphate
  modified_base 19: mod_base = OTHER; note = 2'-O-methylcytidine-3'-phosphate
  modified_base 20: mod_base = OTHER; note = 2'-O-methylguanosine-3'-phosphate
  modified_base 21: mod_base = OTHER; note = 2'-O-methyluridine-3'-phosphate N-[tris(GalNAc-alkyl)-amidodecanoyl)]-4-hydroxyprolinol (Hyp-(GalNAc-alkyl)3)
gacagcgatctgtgacaacgt

SEQ ID NO: 222 - RNA, 21 nt, synthetic construct
  misc_feature 1..21: note = Description of Artificial Sequence: Synthetic oligonucleotide
  source 1..21: mol_type = other RNA
  modified_base 1: mod_base = OTHER; note = 2'-O-methylguanosine-3'-phosphorothioate
  modified_base 2: mod_base = OTHER; note = 2'-O-methylguanosine-3'-phosphorothioate
  modified_base 3: mod_base = OTHER; note = 2'-O-methyladenosine-3'-phosphate
  modified_base 4: mod_base = OTHER; note = 2'-O-methylguanosine-3'-phosphate
  modified_base 5: mod_base = OTHER; note = 2'-O-methylcytidine-3'-phosphate
  modified_base 6: mod_base = OTHER; note = 2'-O-methylcytidine-3'-phosphate
  modified_base 7: mod_base = OTHER; note = 2'-fluoroadenosine-3'-phosphate
  modified_base 8: mod_base = OTHER; note = 2'-O-methyladenosine-3'-phosphate
  modified_base 9: mod_base = OTHER; note = 2'-fluoroadenosine-3'-phosphate
  modified_base 10: mod_base = OTHER; note = 2'-fluoroadenosine-3'-phosphate
  modified_base 11: mod_base = OTHER; note = 2'-fluoroadenosine-3'-phosphate
  modified_base 12: mod_base = OTHER; note = 2'-O-methylguanosine-3'-phosphate
  modified_base 13: mod_base = OTHER; note = 2'-O-methyluridine-3'-phosphate
  modified_base 14: mod_base = OTHER; note = 2'-O-methylguanosine-3'-phosphate
  modified_base 15: mod_base = OTHER; note = 2'-O-methyluridine-3'-phosphate
  modified_base 16: mod_base = OTHER; note = 2'-O-methylcytidine-3'-phosphate
  modified_base 17: mod_base = OTHER; note = 2'-O-methyluridine-3'-phosphate
  modified_base 18: mod_base = OTHER; note = 2'-O-methyladenosine-3'-phosphate
  modified_base 19: mod_base = OTHER; note = 2'-O-methylguanosine-3'-phosphate
  modified_base 20: mod_base = OTHER; note = 2'-O-methyluridine-3'-phosphate
  modified_base 21: mod_base = OTHER; note = 2'-O-methyluridine-3'-phosphate N-[tris(GalNAc-alkyl)-amidodecanoyl)]-4-hydroxyprolinol (Hyp-(GalNAc-alkyl)3)
ggagccaaaaagtgtctagtt

SEQ ID NO: 223 - RNA, 21 nt, synthetic construct
  misc_feature 1..21: note = Description of Artificial Sequence: Synthetic oligonucleotide
  source 1..21: mol_type = other RNA
  modified_base 1: mod_base = OTHER; note = 2'-O-methylguanosine-3'-phosphorothioate
  modified_base 2: mod_base = OTHER; note = 2'-O-methyladenosine-3'-phosphorothioate
  modified_base 3: mod_base = OTHER; note = 2'-O-methylguanosine-3'-phosphate
  modified_base 4: mod_base = OTHER; note = 2'-O-methylguanosine-3'-phosphate
  modified_base 5: mod_base = OTHER; note = 2'-O-methylguanosine-3'-phosphate
  modified_base 6: mod_base = OTHER; note = 2'-O-methyladenosine-3'-phosphate
  modified_base 7: mod_base = OTHER; note = 2'-fluoroadenosine-3'-phosphate
  modified_base 8: mod_base = OTHER; note = 2'-O-methylcytidine-3'-phosphate
  modified_base 9: mod_base = OTHER; note = 2'-fluoroadenosine-3'-phosphate
  modified_base 10: mod_base = OTHER; note = 2'-fluoroadenosine-3'-phosphate
  modified_base 11: mod_base = OTHER; note = 2'-fluorocytidine-3'-phosphate
  modified_base 12: mod_base = OTHER; note = 2'-O-methyluridine-3'-phosphate
  modified_base 13: mod_base = OTHER; note = 2'-O-methylcytidine-3'-phosphate
  modified_base 14: mod_base = OTHER; note = 2'-O-methylguanosine-3'-phosphate
  modified_base 15: mod_base = OTHER; note = 2'-O-methyladenosine-3'-phosphate
  modified_base 16: mod_base = OTHER; note = 2'-O-methylguanosine-3'-phosphate
  modified_base 17: mod_base = OTHER; note = 2'-O-methylcytidine-3'-phosphate
  modified_base 18: mod_base = OTHER; note = 2'-O-methyluridine-3'-phosphate
  modified_base 19: mod_base = OTHER; note = 2'-O-methyluridine-3'-phosphate
  modified_base 20: mod_base = OTHER; note = 2'-O-methyluridine-3'-phosphate
  modified_base 21: mod_base = OTHER; note = 2'-O-methyluridine-3'-phosphate N-[tris(GalNAc-alkyl)-amidodecanoyl)]-4-hydroxyprolinol (Hyp-(GalNAc-alkyl)3)
gagggaacaactcgagctttt

SEQ ID NO: 224 - RNA, 21 nt, synthetic construct
  misc_feature 1..21: note = Description of Artificial Sequence: Synthetic oligonucleotide
  source 1..21: mol_type = other RNA
  modified_base 1: mod_base = OTHER; note = 2'-O-methyladenosine-3'-phosphorothioate
  modified_base 2: mod_base = OTHER; note = 2'-O-methylcytidine-3'-phosphorothioate
  modified_base 3: mod_base = OTHER; note = 2'-O-methyluridine-3'-phosphate
  modified_base 4: mod_base = OTHER; note = 2'-O-methylguanosine-3'-phosphate
  modified_base 5: mod_base = OTHER; note = 2'-O-methylcytidine-3'-phosphate
  modified_base 6: mod_base = OTHER; note = 2'-O-methyluridine-3'-phosphate
  modified_base 7: mod_base = OTHER; note = 2'-fluoroadenosine-3'-phosphate
  modified_base 8: mod_base = OTHER; note = 2'-O-methyluridine-3'-phosphate
  modified_base 9: mod_base = OTHER; note = 2'-fluoroguanosine-3'-phosphate
  modified_base 10: mod_base = OTHER; note = 2'-fluoroadenosine-3'-phosphate
  modified_base 11: mod_base = OTHER; note = 2'-fluorocytidine-3'-phosphate
  modified_base 12: mod_base = OTHER; note = 2'-O-methylguanosine-3'-phosphate
  modified_base 13: mod_base = OTHER; note = 2'-O-methylguanosine-3'-phosphate
  modified_base 14: mod_base = OTHER; note = 2'-O-methyluridine-3'-phosphate
  modified_base 15: mod_base = OTHER; note = 2'-O-methyluridine-3'-phosphate
  modified_base 16: mod_base = OTHER; note = 2'-O-methyladenosine-3'-phosphate
  modified_base 17: mod_base = OTHER; note = 2'-O-methylcytidine-3'-phosphate
  modified_base 18: mod_base = OTHER; note = 2'-O-methyladenosine-3'-phosphate
  modified_base 19: mod_base = OTHER; note = 2'-O-methylcytidine-3'-phosphate
  modified_base 20: mod_base = OTHER; note = 2'-O-methyluridine-3'-phosphate
  modified_base 21: mod_base = OTHER; note = 2'-O-methyluridine-3'-phosphate N-[tris(GalNAc-alkyl)-amidodecanoyl)]-4-hydroxyprolinol (Hyp-(GalNAc-alkyl)3)
actgctatgacggttacactt

SEQ ID NO: 225 - RNA, 21 nt, synthetic construct
  misc_feature 1..21: note = Description of Artificial Sequence: Synthetic oligonucleotide
  source 1..21: mol_type = other RNA
  modified_base 1: mod_base = OTHER; note = 2'-O-methylcytidine-3'-phosphorothioate
  modified_base 2: mod_base = OTHER; note = 2'-O-methyluridine-3'-phosphorothioate
  modified_base 3: mod_base = OTHER; note = 2'-O-methylcytidine-3'-phosphate
  modified_base 4: mod_base = OTHER; note = 2'-O-methyluridine-3'-phosphate
  modified_base 5: mod_base = OTHER; note = 2'-O-methyluridine-3'-phosphate
  modified_base 6: mod_base = OTHER; note = 2'-O-methyluridine-3'-phosphate
  modified_base 7: mod_base = OTHER; note = 2'-fluorocytidine-3'-phosphate
  modified_base 8: mod_base = OTHER; note = 2'-O-methylcytidine-3'-phosphate
  modified_base 9: mod_base = OTHER; note = 2'-fluoroadenosine-3'-phosphate
  modified_base 10: mod_base = OTHER; note = 2'-fluorocytidine-3'-phosphate
  modified_base 11: mod_base = OTHER; note = 2'-fluorouridine-3'-phosphate
  modified_base 12: mod_base = OTHER; note = 2'-O-methylguanosine-3'-phosphate
  modified_base 13: mod_base = OTHER; note = 2'-O-methylcytidine-3'-phosphate
  modified_base 14: mod_base = OTHER; note = 2'-O-methyluridine-3'-phosphate
  modified_base 15: mod_base = OTHER; note = 2'-O-methyladenosine-3'-phosphate
  modified_base 16: mod_base = OTHER; note = 2'-O-methyluridine-3'-phosphate
  modified_base 17: mod_base = OTHER; note = 2'-O-methylguanosine-3'-phosphate
  modified_base 18: mod_base = OTHER; note = 2'-O-methyladenosine-3'-phosphate
  modified_base 19: mod_base = OTHER; note = 2'-O-methylcytidine-3'-phosphate
  modified_base 20: mod_base = OTHER; note = 2'-O-methylguanosine-3'-phosphate
  modified_base 21: mod_base = OTHER; note = 2'-O-methyluridine-3'-phosphate N-[tris(GalNAc-alkyl)-amidodecanoyl)]-4-hydroxyprolinol (Hyp-(GalNAc-alkyl)3)
ctctttccactgctatgacgt

SEQ ID NO: 226 - RNA, 21 nt, synthetic construct
  misc_feature 1..21: note = Description of Artificial Sequence: Synthetic oligonucleotide
  source 1..21: mol_type = other RNA
  modified_base 1: mod_base = OTHER; note = 2'-O-methyladenosine-3'-phosphorothioate
  modified_base 2: mod_base = OTHER; note = 2'-O-methyladenosine-3'-phosphorothioate
  modified_base 3: mod_base = OTHER; note = 2'-O-methylcytidine-3'-phosphate
  modified_base 4: mod_base = OTHER; note = 2'-O-methyluridine-3'-phosphate
  modified_base 5: mod_base = OTHER; note = 2'-O-methylcytidine-3'-phosphate
  modified_base 6: mod_base = OTHER; note = 2'-O-methylguanosine-3'-phosphate
  modified_base 7: mod_base = OTHER; note = 2'-fluoroadenosine-3'-phosphate
  modified_base 8: mod_base = OTHER; note = 2'-O-methylguanosine-3'-phosphate
  modified_base 9: mod_base = OTHER; note = 2'-fluorocytidine-3'-phosphate
  modified_base 10: mod_base = OTHER; note = 2'-fluorouridine-3'-phosphate
  modified_base 11: mod_base = OTHER; note = 2'-fluorouridine-3'-phosphate
  modified_base 12: mod_base = OTHER; note = 2'-O-methyluridine-3'-phosphate
  modified_base 13: mod_base = OTHER; note = 2'-O-methylguanosine-3'-phosphate
  modified_base 14: mod_base = OTHER; note = 2'-O-methyladenosine-3'-phosphate
  modified_base 15: mod_base = OTHER; note = 2'-O-methylguanosine-3'-phosphate
  modified_base 16: mod_base = OTHER; note = 2'-O-methylguanosine-3'-phosphate
  modified_base 17: mod_base = OTHER; note = 2'-O-methylcytidine-3'-phosphate
  modified_base 18: mod_base = OTHER; note = 2'-O-methyluridine-3'-phosphate
  modified_base 19: mod_base = OTHER; note = 2'-O-methyluridine-3'-phosphate
  modified_base 20: mod_base = OTHER; note = 2'-O-methylcytidine-3'-phosphate
  modified_base 21: mod_base = OTHER; note = 2'-O-methyluridine-3'-phosphate N-[tris(GalNAc-alkyl)-amidodecanoyl)]-4-hydroxyprolinol (Hyp-(GalNAc-alkyl)3)
aactcgagctttgaggcttct

SEQ ID NO: 227 - RNA, 21 nt, synthetic construct
  misc_feature 1..21: note = Description of Artificial Sequence: Synthetic oligonucleotide
  source 1..21: mol_type = other RNA
  modified_base 1: mod_base = OTHER; note = 2'-O-methylcytidine-3'-phosphorothioate
  modified_base 2: mod_base = OTHER; note = 2'-O-methyladenosine-3'-phosphorothioate
  modified_base 3: mod_base = OTHER; note = 2'-O-methylguanosine-3'-phosphate
  modified_base 4: mod_base = OTHER; note = 2'-O-methyladenosine-3'-phosphate
  modified_base 5: mod_base = OTHER; note = 2'-O-methylcytidine-3'-phosphate
  modified_base 6: mod_base = OTHER; note = 2'-O-methyladenosine-3'-phosphate
  modified_base 7: mod_base = OTHER; note = 2'-fluoroguanosine-3'-phosphate
  modified_base 8: mod_base = OTHER; note = 2'-O-methylcytidine-3'-phosphate
  modified_base 9: mod_base = OTHER; note = 2'-fluoroguanosine-3'-phosphate
  modified_base 10: mod_base = OTHER; note = 2'-fluoroadenosine-3'-phosphate
  modified_base 11: mod_base = OTHER; note = 2'-fluorouridine-3'-phosphate
  modified_base 12: mod_base = OTHER; note = 2'-O-methylcytidine-3'-phosphate
  modified_base 13: mod_base = OTHER; note = 2'-O-methyluridine-3'-phosphate
  modified_base 14: mod_base = OTHER; note = 2'-O-methylguanosine-3'-phosphate
  modified_base 15: mod_base = OTHER; note = 2'-O-methyluridine-3'-phosphate
  modified_base 16: mod_base = OTHER; note = 2'-O-methylguanosine-3'-phosphate
  modified_base 17: mod_base = OTHER; note = 2'-O-methyladenosine-3'-phosphate
  modified_base 18: mod_base = OTHER; note = 2'-O-methylcytidine-3'-phosphate
  modified_base 19: mod_base = OTHER; note = 2'-O-methyladenosine-3'-phosphate
  modified_base 20: mod_base = OTHER; note = 2'-O-methyladenosine-3'-phosphate
  modified_base 21: mod_base = OTHER; note = 2'-O-methyluridine-3'-phosphate N-[tris(GalNAc-alkyl)-amidodecanoyl)]-4-hydroxyprolinol (Hyp-(GalNAc-alkyl)3)
cagacagcgatctgtgacaat

SEQ ID NO: 228 - RNA, 21 nt, synthetic construct
  misc_feature 1..21: note = Description of Artificial Sequence: Synthetic oligonucleotide
  source 1..21: mol_type = other RNA
  modified_base 1: mod_base = OTHER; note = 2'-O-methylcytidine-3'-phosphorothioate
  modified_base 2: mod_base = OTHER; note = 2'-O-methylcytidine-3'-phosphorothioate
  modified_base 3: mod_base = OTHER; note = 2'-O-methyluridine-3'-phosphate
  modified_base 4: mod_base = OTHER; note = 2'-O-methyluridine-3'-phosphate
  modified_base 5: mod_base = OTHER; note = 2'-O-methylcytidine-3'-phosphate
  modified_base 6: mod_base = OTHER; note = 2'-O-methyluridine-3'-phosphate
  modified_base 7: mod_base = OTHER; note = 2'-fluoroguanosine-3'-phosphate
  modified_base 8: mod_base = OTHER; note = 2'-O-methylguanosine-3'-phosphate
  modified_base 9: mod_base = OTHER; note = 2'-fluorocytidine-3'-phosphate
  modified_base 10: mod_base = OTHER; note = 2'-fluorouridine-3'-phosphate
  modified_base 11: mod_base = OTHER; note = 2'-fluorouridine-3'-phosphate
  modified_base 12: mod_base = OTHER; note = 2'-O-methylcytidine-3'-phosphate
  modified_base 13: mod_base = OTHER; note = 2'-O-methyluridine-3'-phosphate
  modified_base 14: mod_base = OTHER; note = 2'-O-methyladenosine-3'-phosphate
  modified_base 15: mod_base = OTHER; note = 2'-O-methylcytidine-3'-phosphate
  modified_base 16: mod_base = OTHER; note = 2'-O-methylcytidine-3'-phosphate
  modified_base 17: mod_base = OTHER; note = 2'-O-methylcytidine-3'-phosphate
  modified_base 18: mod_base = OTHER; note = 2'-O-methylguanosine-3'-phosphate
  modified_base 19: mod_base = OTHER; note = 2'-O-methyluridine-3'-phosphate
  modified_base 20: mod_base = OTHER; note = 2'-O-methyladenosine-3'-phosphate
  modified_base 21: mod_base = OTHER; note = 2'-O-methyluridine-3'-phosphate N-[tris(GalNAc-alkyl)-amidodecanoyl)]-4-hydroxyprolinol (Hyp-(GalNAc-alkyl)3)
ccttctggcttctacccgtat

SEQ ID NO: 229 - RNA, 21 nt, synthetic construct
  misc_feature 1..21: note = Description of Artificial Sequence: Synthetic oligonucleotide
  source 1..21: mol_type = other RNA
  modified_base 1: mod_base = OTHER; note = 2'-O-methyladenosine-3'-phosphorothioate
  modified_base 2: mod_base = OTHER; note = 2'-O-methylcytidine-3'-phosphorothioate
  modified_base 3: mod_base = OTHER; note = 2'-O-methylcytidine-3'-phosphate
  modified_base 4: mod_base = OTHER; note = 2'-O-methyladenosine-3'-phosphate
  modified_base 5: mod_base = OTHER; note = 2'-O-methyluridine-3'-phosphate
  modified_base 6: mod_base = OTHER; note = 2'-O-methyladenosine-3'-phosphate
  modified_base 7: mod_base = OTHER; note = 2'-fluoroguanosine-3'-phosphate
  modified_base 8: mod_base = OTHER; note = 2'-O-methyladenosine-3'-phosphate
  modified_base 9: mod_base = OTHER; note = 2'-fluoroadenosine-3'-phosphate
  modified_base 10: mod_base = OTHER; note = 2'-fluoroguanosine-3'-phosphate
  modified_base 11: mod_base = OTHER; note = 2'-fluoroguanosine-3'-phosphate
  modified_base 12: mod_base = OTHER; note = 2'-O-methyladenosine-3'-phosphate
  modified_base 13: mod_base = OTHER; note = 2'-O-methylguanosine-3'-phosphate
  modified_base 14: mod_base = OTHER; note = 2'-O-methyluridine-3'-phosphate
  modified_base 15: mod_base = OTHER; note = 2'-O-methylcytidine-3'-phosphate
  modified_base 16: mod_base = OTHER; note = 2'-O-methylguanosine-3'-phosphate
  modified_base 17: mod_base = OTHER; note = 2'-O-methyladenosine-3'-phosphate
  modified_base 18: mod_base = OTHER; note = 2'-O-methyluridine-3'-phosphate
  modified_base 19: mod_base = OTHER; note = 2'-O-methylguanosine-3'-phosphate
  modified_base 20: mod_base = OTHER; note = 2'-O-methylcytidine-3'-phosphate
  modified_base 21: mod_base = OTHER; note = 2'-O-methyluridine-3'-phosphate N-[tris(GalNAc-alkyl)-amidodecanoyl)]-4-hydroxyprolinol (Hyp-(GalNAc-alkyl)3)
accatagaaggagtcgatgct

SEQ ID NO: 230 - RNA, 21 nt, synthetic construct
  misc_feature 1..21: note = Description of Artificial Sequence: Synthetic oligonucleotide
  source 1..21: mol_type = other RNA
  modified_base 1: mod_base = OTHER; note = 2'-O-methyladenosine-3'-phosphorothioate
  modified_base 2: mod_base = OTHER; note = 2'-O-methylcytidine-3'-phosphorothioate
  modified_base 3: mod_base = OTHER; note = 2'-O-methylcytidine-3'-phosphate
  modified_base 4: mod_base = OTHER; note = 2'-O-methyladenosine-3'-phosphate
  modified_base 5: mod_base = OTHER; note = 2'-O-methyladenosine-3'-phosphate
  modified_base 6: mod_base = OTHER; note = 2'-O-methylguanosine-3'-phosphate
  modified_base 7: mod_base = OTHER; note = 2'-fluorouridine-3'-phosphate
  modified_base 8: mod_base = OTHER; note = 2'-O-methylguanosine-3'-phosphate
  modified_base 9: mod_base = OTHER; note = 2'-fluoroadenosine-3'-phosphate
  modified_base 10: mod_base = OTHER; note = 2'-fluoroadenosine-3'-phosphate
  modified_base 11: mod_base = OTHER; note = 2'-fluorocytidine-3'-phosphate
  modified_base 12: mod_base = OTHER; note = 2'-O-methyladenosine-3'-phosphate
  modified_base 13: mod_base = OTHER; note = 2'-O-methyluridine-3'-phosphate
  modified_base 14: mod_base = OTHER; note = 2'-O-methylcytidine-3'-phosphate
  modified_base 15: mod_base = OTHER; note = 2'-O-methyladenosine-3'-phosphate
  modified_base 16: mod_base = OTHER; note = 2'-O-methyladenosine-3'-phosphate
  modified_base 17: mod_base = OTHER; note = 2'-O-methyluridine-3'-phosphate
  modified_base 18: mod_base = OTHER; note = 2'-O-methylguanosine-3'-phosphate
  modified_base 19: mod_base = OTHER; note = 2'-O-methylcytidine-3'-phosphate
  modified_base 20: mod_base = OTHER; note = 2'-O-methyluridine-3'-phosphate
  modified_base 21: mod_base = OTHER; note = 2'-O-methyluridine-3'-phosphate N-[tris(GalNAc-alkyl)-amidodecanoyl)]-4-hydroxyprolinol (Hyp-(GalNAc-alkyl)3)
accaagtgaacatcaatgctt

SEQ ID NO: 231 - RNA, 21 nt, synthetic construct
  misc_feature 1..21: note = Description of Artificial Sequence: Synthetic oligonucleotide
  source 1..21: mol_type = other RNA
  modified_base 1: mod_base = OTHER; note = 2'-O-methyluridine-3'-phosphorothioate
  modified_base 2: mod_base = OTHER; note = 2'-O-methylguanosine-3'-phosphorothioate
  modified_base 3: mod_base = OTHER; note = 2'-O-methyladenosine-3'-phosphate
  modified_base 4: mod_base = OTHER; note = 2'-O-methyladenosine-3'-phosphate
  modified_base 5: mod_base = OTHER; note = 2'-O-methyladenosine-3'-phosphate
  modified_base 6: mod_base = OTHER; note = 2'-O-methyluridine-3'-phosphate
  modified_base 7: mod_base = OTHER; note = 2'-fluorocytidine-3'-phosphate
  modified_base 8: mod_base = OTHER; note = 2'-O-methyladenosine-3'-phosphate
  modified_base 9: mod_base = OTHER; note = 2'-fluoroadenosine-3'-phosphate
  modified_base 10: mod_base = OTHER; note = 2'-fluorouridine-3'-phosphate
  modified_base 11: mod_base = OTHER; note = 2'-fluorouridine-3'-phosphate
  modified_base 12: mod_base = OTHER; note = 2'-O-methyladenosine-3'-phosphate
  modified_base 13: mod_base = OTHER; note = 2'-O-methyluridine-3'-phosphate
  modified_base 14: mod_base = OTHER; note = 2'-O-methylguanosine-3'-phosphate
  modified_base 15: mod_base = OTHER; note = 2'-O-methyladenosine-3'-phosphate
  modified_base 16: mod_base = OTHER; note = 2'-O-methyladenosine-3'-phosphate
  modified_base 17: mod_base = OTHER; note = 2'-O-methylguanosine-3'-phosphate
  modified_base 18: mod_base = OTHER; note = 2'-O-methyladenosine-3'-phosphate
  modified_base 19: mod_base = OTHER; note = 2'-O-methylcytidine-3'-phosphate
  modified_base 20: mod_base = OTHER; note = 2'-O-methylcytidine-3'-phosphate
  modified_base 21: mod_base = OTHER; note = 2'-O-methyluridine-3'-phosphate N-[tris(GalNAc-alkyl)-amidodecanoyl)]-4-hydroxyprolinol (Hyp-(GalNAc-alkyl)3)
tgaaatcaattatgaagacct

SEQ ID NO: 232 - RNA, 21 nt, synthetic construct
  misc_feature 1..21: note = Description of Artificial Sequence: Synthetic oligonucleotide
  source 1..21: mol_type = other RNA
  modified_base 1: mod_base = OTHER; note = 2'-O-methylguanosine-3'-phosphorothioate
  modified_base 2: mod_base = OTHER; note = 2'-O-methyladenosine-3'-phosphorothioate
  modified_base 3: mod_base = OTHER; note = 2'-O-methyluridine-3'-phosphate
  modified_base 4: mod_base = OTHER; note = 2'-O-methyladenosine-3'-phosphate
  modified_base 5: mod_base = OTHER; note = 2'-O-methylguanosine-3'-phosphate
  modified_base 6: mod_base = OTHER; note = 2'-O-methyluridine-3'-phosphate
  modified_base 7: mod_base = OTHER; note = 2'-fluorouridine-3'-phosphate
  modified_base 8: mod_base = OTHER; note = 2'-O-methylcytidine-3'-phosphate
  modified_base 9: mod_base = OTHER; note = 2'-fluoroadenosine-3'-phosphate
  modified_base 10: mod_base = OTHER; note = 2'-fluorocytidine-3'-phosphate
  modified_base 11: mod_base = OTHER; note = 2'-fluoroadenosine-3'-phosphate
  modified_base 12: mod_base = OTHER; note = 2'-O-methyladenosine-3'-phosphate
  modified_base 13: mod_base = OTHER; note = 2'-O-methylguanosine-3'-phosphate
  modified_base 14: mod_base = OTHER; note = 2'-O-methyladenosine-3'-phosphate
  modified_base 15: mod_base = OTHER; note = 2'-O-methylguanosine-3'-phosphate
  modified_base 16: mod_base = OTHER; note = 2'-O-methyladenosine-3'-phosphate
  modified_base 17: mod_base = OTHER; note = 2'-O-methyladenosine-3'-phosphate
  modified_base 18: mod_base = OTHER; note = 2'-O-methylguanosine-3'-phosphate
  modified_base 19: mod_base = OTHER; note = 2'-O-methyluridine-3'-phosphate
  modified_base 20: mod_base = OTHER; note = 2'-O-methylcytidine-3'-phosphate
  modified_base 21: mod_base = OTHER; note = 2'-O-methyluridine-3'-phosphate N-[tris(GalNAc-alkyl)-amidodecanoyl)]-4-hydroxyprolinol (Hyp-(GalNAc-alkyl)3)
gatagttcacaagagaagtct

SEQ ID NO: 233 - RNA, 21 nt, synthetic construct
  misc_feature 1..21: note = Description of Artificial Sequence: Synthetic oligonucleotide
  source 1..21: mol_type = other RNA
  modified_base 1: mod_base = OTHER; note = 2'-O-methyladenosine-3'-phosphorothioate
  modified_base 2: mod_base = OTHER; note = 2'-O-methyladenosine-3'-phosphorothioate
  modified_base 3: mod_base = OTHER; note = 2'-O-methylguanosine-3'-phosphate
  modified_base 4: mod_base = OTHER; note = 2'-O-methylguanosine-3'-phosphate
  modified_base 5: mod_base = OTHER; note = 2'-O-methylguanosine-3'-phosphate
  modified_base 6: mod_base = OTHER; note = 2'-O-methyluridine-3'-phosphate
  modified_base 7: mod_base = OTHER; note = 2'-fluoroadenosine-3'-phosphate
  modified_base 8: mod_base = OTHER; note = 2'-O-methylcytidine-3'-phosphate
  modified_base 9: mod_base = OTHER; note = 2'-fluorocytidine-3'-phosphate
  modified_base 10: mod_base = OTHER; note = 2'-fluoroguanosine-3'-phosphate
  modified_base 11: mod_base = OTHER; note = 2'-fluoroadenosine-3'-phosphate
  modified_base 12: mod_base = OTHER; note = 2'-O-methyluridine-3'-phosphate
  modified_base 13: mod_base = OTHER; note = 2'-O-methyluridine-3'-phosphate
  modified_base 14: mod_base = OTHER; note = 2'-O-methyladenosine-3'-phosphate
  modified_base 15: mod_base = OTHER; note = 2'-O-methylcytidine-3'-phosphate
  modified_base 16: mod_base = OTHER; note = 2'-O-methylcytidine-3'-phosphate
  modified_base 17: mod_base = OTHER; note = 2'-O-methyladenosine-3'-phosphate
  modified_base 18: mod_base = OTHER; note = 2'-O-methylcytidine-3'-phosphate
  modified_base 19: mod_base = OTHER; note = 2'-O-methyladenosine-3'-phosphate
  modified_base 20: mod_base = OTHER; note = 2'-O-methyladenosine-3'-phosphate
  modified_base 21: mod_base = OTHER; note = 2'-O-methyluridine-3'-phosphate N-[tris(GalNAc-alkyl)-amidodecanoyl)]-4-hydroxyprolinol (Hyp-(GalNAc-alkyl)3)
aagggtaccgattaccacaat

SEQ ID NO: 234 - RNA, 21 nt, synthetic construct
  misc_feature 1..21: note = Description of Artificial Sequence: Synthetic oligonucleotide
  source 1..21: mol_type = other RNA
  modified_base 1: mod_base = OTHER; note = 2'-O-methylcytidine-3'-phosphorothioate
  modified_base 2: mod_base = OTHER; note = 2'-O-methyladenosine-3'-phosphorothioate
  modified_base 3: mod_base = OTHER; note = 2'-O-methyladenosine-3'-phosphate
  modified_base 4: mod_base = OTHER; note = 2'-O-methylguanosine-3'-phosphate
  modified_base 5: mod_base = OTHER; note = 2'-O-methyladenosine-3'-phosphate
  modified_base 6: mod_base = OTHER; note = 2'-O-methylcytidine-3'-phosphate
  modified_base 7: mod_base = OTHER; note = 2'-fluorouridine-3'-phosphate
  modified_base 8: mod_base = OTHER; note = 2'-O-methylcytidine-3'-phosphate
  modified_base 9: mod_base = OTHER; note = 2'-fluorocytidine-3'-phosphate
  modified_base 10: mod_base = OTHER; note = 2'-fluorouridine-3'-phosphate
  modified_base 11: mod_base = OTHER; note = 2'-fluorouridine-3'-phosphate
  modified_base 12: mod_base = OTHER; note = 2'-O-methylcytidine-3'-phosphate
  modified_base 13: mod_base = OTHER; note = 2'-O-methyladenosine-3'-phosphate
  modified_base 14: mod_base = OTHER; note = 2'-O-methyluridine-3'-phosphate
  modified_base 15: mod_base = OTHER; note = 2'-O-methylguanosine-3'-phosphate
  modified_base 16: mod_base = OTHER; note = 2'-O-methyluridine-3'-phosphate
  modified_base 17: mod_base = OTHER; note = 2'-O-methyladenosine-3'-phosphate
  modified_base 18: mod_base = OTHER; note = 2'-O-methylcytidine-3'-phosphate
  modified_base 19: mod_base = OTHER; note = 2'-O-methylguanosine-3'-phosphate
  modified_base 20: mod_base = OTHER; note = 2'-O-methyladenosine-3'-phosphate
  modified_base 21: mod_base = OTHER; note = 2'-O-methyluridine-3'-phosphate N-[tris(GalNAc-alkyl)-amidodecanoyl)]-4-hydroxyprolinol (Hyp-(GalNAc-alkyl)3)
caagactccttcatgtacgat

SEQ ID NO: 235 - RNA, 21 nt, synthetic construct
  misc_feature 1..21: note = Description of Artificial Sequence: Synthetic oligonucleotide
  source 1..21: mol_type = other RNA
  modified_base 1: mod_base = OTHER; note = 2'-O-methylcytidine-3'-phosphorothioate
  modified_base 2: mod_base = OTHER; note = 2'-O-methyluridine-3'-phosphorothioate
  modified_base 3: mod_base = OTHER; note = 2'-O-methylguanosine-3'-phosphate
  modified_base 4: mod_base = OTHER; note = 2'-O-methyladenosine-3'-phosphate
  modified_base 5: mod_base = OTHER; note = 2'-O-methylcytidine-3'-phosphate
  modified_base 6: mod_base = OTHER; note = 2'-O-methyluridine-3'-phosphate
  modified_base 7: mod_base = OTHER; note = 2'-fluorocytidine-3'-phosphate
  modified_base 8: mod_base = OTHER; note = 2'-O-methylguanosine-3'-phosphate
  modified_base 9: mod_base = OTHER; note = 2'-fluoroguanosine-3'-phosphate
  modified_base 10: mod_base = OTHER; note = 2'-fluoroadenosine-3'-phosphate
  modified_base 11: mod_base = OTHER; note = 2'-fluoroadenosine-3'-phosphate
  modified_base 12: mod_base = OTHER; note = 2'-O-methylguanosine-3'-phosphate
  modified_base 13: mod_base = OTHER; note = 2'-O-methylguanosine-3'-phosphate
  modified_base 14: mod_base = OTHER; note = 2'-O-methyladenosine-3'-phosphate
  modified_base 15: mod_base = OTHER; note = 2'-O-methylguanosine-3'-phosphate
  modified_base 16: mod_base = OTHER; note = 2'-O-methylguanosine-3'-phosphate
  modified_base 17: mod_base = OTHER; note = 2'-O-methyluridine-3'-phosphate
  modified_base 18: mod_base = OTHER; note = 2'-O-methylcytidine-3'-phosphate
  modified_base 19: mod_base = OTHER; note = 2'-O-methyluridine-3'-phosphate
  modified_base 20: mod_base = OTHER; note = 2'-O-methyladenosine-3'-phosphate
  modified_base 21: mod_base = OTHER; note = 2'-O-methyluridine-3'-phosphate N-[tris(GalNAc-alkyl)-amidodecanoyl)]-4-hydroxyprolinol (Hyp-(GalNAc-alkyl)3)
ctgactcggaaggaggtctat

SEQ ID NO: 236 - RNA, 21 nt, synthetic construct
  misc_feature 1..21: note = Description of Artificial Sequence: Synthetic oligonucleotide
  source 1..21: mol_type = other RNA
  modified_base 1: mod_base = OTHER; note = 2'-O-methyluridine-3'-phosphorothioate
  modified_base 2: mod_base = OTHER; note = 2'-O-methyladenosine-3'-phosphorothioate
  modified_base 3: mod_base = OTHER; note = 2'-O-methylguanosine-3'-phosphate
  modified_base 4: mod_base = OTHER; note = 2'-O-methyluridine-3'-phosphate
  modified_base 5: mod_base = OTHER; note = 2'-O-methyluridine-3'-phosphate
  modified_base 6: mod_base = OTHER; note = 2'-O-methylcytidine-3'-phosphate
  modified_base 7: mod_base = OTHER; note = 2'-fluoroadenosine-3'-phosphate
  modified_base 8: mod_base = OTHER; note = 2'-O-methylcytidine-3'-phosphate
  modified_base 9: mod_base = OTHER; note = 2'-fluoroadenosine-3'-phosphate
  modified_base 10: mod_base = OTHER; note = 2'-fluoroadenosine-3'-phosphate
  modified_base 11: mod_base = OTHER; note = 2'-fluoroguanosine-3'-phosphate
  modified_base 12: mod_base = OTHER; note = 2'-O-methyladenosine-3'-phosphate
  modified_base 13: mod_base = OTHER; note = 2'-O-methylguanosine-3'-phosphate
  modified_base 14: mod_base = OTHER; note = 2'-O-methyladenosine-3'-phosphate
  modified_base 15: mod_base = OTHER; note = 2'-O-methyladenosine-3'-phosphate
  modified_base 16: mod_base = OTHER; note = 2'-O-methylguanosine-3'-phosphate
  modified_base 17: mod_base = OTHER; note = 2'-O-methyluridine-3'-phosphate
  modified_base 18: mod_base = OTHER; note = 2'-O-methylcytidine-3'-phosphate
  modified_base 19: mod_base = OTHER; note = 2'-O-methylguanosine-3'-phosphate
  modified_base 20: mod_base = OTHER; note = 2'-O-methyluridine-3'-phosphate
  modified_base 21: mod_base = OTHER; note = 2'-O-methyluridine-3'-phosphate N-[tris(GalNAc-alkyl)-amidodecanoyl)]-4-hydroxyprolinol (Hyp-(GalNAc-alkyl)3)
tagttcacaagagaagtcgtt

SEQ ID NO: 237 - RNA, 21 nt, synthetic construct
  misc_feature 1..21: note = Description of Artificial Sequence: Synthetic oligonucleotide
  source 1..21: mol_type = other RNA
  modified_base 1: mod_base = OTHER; note = 2'-O-methylguanosine-3'-phosphorothioate
  modified_base 2: mod_base = OTHER; note = 2'-O-methyluridine-3'-phosphorothioate
  modified_base 3: mod_base = OTHER; note = 2'-O-methylcytidine-3'-phosphate
  modified_base 4: mod_base = OTHER; note = 2'-O-methyluridine-3'-phosphate
  modified_base 5: mod_base = OTHER; note = 2'-O-methylguanosine-3'-phosphate
  modified_base 6: mod_base = OTHER; note = 2'-O-methylcytidine-3'-phosphate
  modified_base 7: mod_base = OTHER; note = 2'-fluoroadenosine-3'-phosphate
  modified_base 8: mod_base = OTHER; note = 2'-O-methyladenosine-3'-phosphate
  modified_base 9: mod_base = OTHER; note = 2'-fluoroadenosine-3'-phosphate
  modified_base 10: mod_base = OTHER; note = 2'-fluoroadenosine-3'-phosphate
  modified_base 11: mod_base = OTHER; note = 2'-fluoroadenosine-3'-phosphate
  modified_base 12: mod_base = OTHER; note = 2'-O-methylcytidine-3'-phosphate
  modified_base 13: mod_base = OTHER; note = 2'-O-methylcytidine-3'-phosphate
  modified_base 14: mod_base = OTHER; note = 2'-O-methyladenosine-3'-phosphate
  modified_base 15: mod_base = OTHER; note = 2'-O-methylguanosine-3'-phosphate
  modified_base 16: mod_base = OTHER; note = 2'-O-methyladenosine-3'-phosphate
  modified_base 17: mod_base = OTHER; note = 2'-O-methyladenosine-3'-phosphate
  modified_base 18: mod_base = OTHER; note = 2'-O-methylguanosine-3'-phosphate
  modified_base 19: mod_base = OTHER; note = 2'-O-methylcytidine-3'-phosphate
  modified_base 20: mod_base = OTHER; note = 2'-O-methylguanosine-3'-phosphate
  modified_base 21: mod_base = OTHER; note = 2'-O-methyluridine-3'-phosphate N-[tris(GalNAc-alkyl)-amidodecanoyl)]-4-hydroxyprolinol (Hyp-(GalNAc-alkyl)3)
gtctgcaaaaaccagaagcgt

SEQ ID NO: 238 - RNA, 21 nt, synthetic construct
  misc_feature 1..21: note = Description of Artificial Sequence: Synthetic oligonucleotide
  source 1..21: mol_type = other RNA
  modified_base 1: mod_base = OTHER; note = 2'-O-methyladenosine-3'-phosphorothioate
  modified_base 2: mod_base = OTHER; note = 2'-O-methylguanosine-3'-phosphorothioate
  modified_base 3: mod_base = OTHER; note = 2'-O-methylcytidine-3'-phosphate
  modified_base 4: mod_base = OTHER; note = 2'-O-methylguanosine-3'-phosphate
  modified_base 5: mod_base = OTHER; note = 2'-O-methyladenosine-3'-phosphate
  modified_base 6: mod_base = OTHER; note = 2'-O-methyluridine-3'-phosphate
  modified_base 7: mod_base = OTHER; note = 2'-fluorocytidine-3'-phosphate
  modified_base 8: mod_base = OTHER; note = 2'-O-methyluridine-3'-phosphate
  modified_base 9: mod_base = OTHER; note = 2'-fluoroguanosine-3'-phosphate
  modified_base 10: mod_base = OTHER; note = 2'-fluorouridine-3'-phosphate
  modified_base 11: mod_base = OTHER; note = 2'-fluoroguanosine-3'-phosphate
  modified_base 12: mod_base = OTHER; note = 2'-O-methyladenosine-3'-phosphate
  modified_base 13: mod_base = OTHER; note = 2'-O-methylcytidine-3'-phosphate
  modified_base 14: mod_base = OTHER; note = 2'-O-methyladenosine-3'-phosphate
  modified_base 15: mod_base = OTHER; note = 2'-O-methyladenosine-3'-phosphate
  modified_base 16: mod_base = OTHER; note = 2'-O-methylcytidine-3'-phosphate
  modified_base 17: mod_base = OTHER; note = 2'-O-methylguanosine-3'-phosphate
  modified_base 18: mod_base = OTHER; note = 2'-O-methylguanosine-3'-phosphate
  modified_base 19: mod_base = OTHER; note = 2'-O-methyladenosine-3'-phosphate
  modified_base 20: mod_base = OTHER; note = 2'-O-methylguanosine-3'-phosphate
  modified_base 21: mod_base = OTHER; note = 2'-O-methyluridine-3'-phosphate N-[tris(GalNAc-alkyl)-amidodecanoyl)]-4-hydroxyprolinol (Hyp-(GalNAc-alkyl)3)
agcgatctgtgacaacggagt

SEQ ID NO: 239 - RNA, 21 nt, synthetic construct
  misc_feature 1..21: note = Description of Artificial Sequence: Synthetic oligonucleotide
  source 1..21: mol_type = other RNA
  modified_base 1: mod_base = OTHER; note = 2'-O-methyladenosine-3'-phosphorothioate
  modified_base 2: mod_base = OTHER; note = 2'-O-methylcytidine-3'-phosphorothioate
  modified_base 3: mod_base = OTHER; note = 2'-O-methyluridine-3'-phosphate
  modified_base 4: mod_base = OTHER; note = 2'-O-methylcytidine-3'-phosphate
  modified_base 5: mod_base = OTHER; note = 2'-O-methylguanosine-3'-phosphate
  modified_base 6: mod_base = OTHER; note = 2'-O-methylguanosine-3'-phosphate
  modified_base 7: mod_base = OTHER; note = 2'-fluoroadenosine-3'-phosphate
  modified_base 8: mod_base = OTHER; note = 2'-O-methyladenosine-3'-phosphate
  modified_base 9: mod_base = OTHER; note = 2'-fluoroguanosine-3'-phosphate
  modified_base 10: mod_base = OTHER; note = 2'-fluoroguanosine-3'-phosphate
  modified_base 11: mod_base = OTHER; note = 2'-fluoroadenosine-3'-phosphate
  modified_base 12: mod_base = OTHER; note = 2'-O-methylguanosine-3'-phosphate
  modified_base 13: mod_base = OTHER; note = 2'-O-methylguanosine-3'-phosphate
  modified_base 14: mod_base = OTHER; note = 2'-O-methyluridine-3'-phosphate
  modified_base 15: mod_base = OTHER; note = 2'-O-methylcytidine-3'-phosphate
  modified_base 16: mod_base = OTHER; note = 2'-O-methyluridine-3'-phosphate
  modified_base 17: mod_base = OTHER; note = 2'-O-methyladenosine-3'-phosphate
  modified_base 18: mod_base = OTHER; note = 2'-O-methylcytidine-3'-phosphate
  modified_base 19: mod_base = OTHER; note = 2'-O-methyladenosine-3'-phosphate
  modified_base 20: mod_base = OTHER; note = 2'-O-methyluridine-3'-phosphate
  modified_base 21: mod_base = OTHER; note = 2'-O-methyluridine-3'-phosphate N-[tris(GalNAc-alkyl)-amidodecanoyl)]-4-hydroxyprolinol (Hyp-(GalNAc-alkyl)3)
actcggaaggaggtctacatt

SEQ ID NO: 240 - RNA, 21 nt, synthetic construct
  misc_feature 1..21: note = Description of Artificial Sequence: Synthetic oligonucleotide
  source 1..21: mol_type = other RNA
  modified_base 1: mod_base = OTHER; note = 2'-O-methylguanosine-3'-phosphorothioate
  modified_base 2: mod_base = OTHER; note = 2'-O-methyladenosine-3'-phosphorothioate
  modified_base 3: mod_base = OTHER; note = 2'-O-methylcytidine-3'-phosphate
  modified_base 4: mod_base = OTHER; note = 2'-O-methyluridine-3'-phosphate
  modified_base 5: mod_base = OTHER; note = 2'-O-methylcytidine-3'-phosphate
  modified_base 6: mod_base = OTHER; note = 2'-O-methylcytidine-3'-phosphate
  modified_base 7: mod_base = OTHER; note = 2'-fluorouridine-3'-phosphate
  modified_base 8: mod_base = OTHER; note = 2'-O-methyluridine-3'-phosphate
  modified_base 9: mod_base = OTHER; note = 2'-fluorocytidine-3'-phosphate
  modified_base 10: mod_base = OTHER; note = 2'-fluoroadenosine-3'-phosphate
  modified_base 11: mod_base = OTHER; note = 2'-fluorouridine-3'-phosphate
  modified_base 12: mod_base = OTHER; note = 2'-O-methylguanosine-3'-phosphate
  modified_base 13: mod_base = OTHER; note = 2'-O-methyluridine-3'-phosphate
  modified_base 14: mod_base = OTHER; note = 2'-O-methyladenosine-3'-phosphate
  modified_base 15: mod_base = OTHER; note = 2'-O-methylcytidine-3'-phosphate
  modified_base 16: mod_base = OTHER; note = 2'-O-methylguanosine-3'-phosphate
  modified_base 17: mod_base = OTHER; note = 2'-O-methyladenosine-3'-phosphate
  modified_base 18: mod_base = OTHER; note = 2'-O-methylcytidine-3'-phosphate
  modified_base 19: mod_base = OTHER; note = 2'-O-methyladenosine-3'-phosphate
  modified_base 20: mod_base = OTHER; note = 2'-O-methylcytidine-3'-phosphate
  modified_base 21: mod_base = OTHER; note = 2'-O-methyluridine-3'-phosphate N-[tris(GalNAc-alkyl)-amidodecanoyl)]-4-hydroxyprolinol (Hyp-(GalNAc-alkyl)3)
gactccttcatgtacgacact

SEQ ID NO: 241 - RNA, 21 nt, synthetic construct
  misc_feature 1..21: note = Description of Artificial Sequence: Synthetic oligonucleotide
  source 1..21: mol_type = other RNA
  modified_base 1: mod_base = OTHER; note = 2'-O-methyladenosine-3'-phosphorothioate
  modified_base 2: mod_base = OTHER; note = 2'-O-methylguanosine-3'-phosphorothioate
  modified_base 3: mod_base = OTHER; note = 2'-O-methyluridine-3'-phosphate
  modified_base 4: mod_base = OTHER; note = 2'-O-methylcytidine-3'-phosphate
  modified_base 5: mod_base = OTHER; note = 2'-O-methylguanosine-3'-phosphate
  modified_base 6: mod_base = OTHER; note = 2'-O-methyluridine-3'-phosphate
  modified_base 7: mod_base = OTHER; note = 2'-fluorouridine-3'-phosphate
  modified_base 8: mod_base = OTHER; note = 2'-O-methyluridine-3'-phosphate
  modified_base 9: mod_base = OTHER; note = 2'-fluorocytidine-3'-phosphate
  modified_base 10: mod_base = OTHER; note = 2'-fluoroadenosine-3'-phosphate
  modified_base 11: mod_base = OTHER; note = 2'-fluorouridine-3'-phosphate
  modified_base 12: mod_base = OTHER; note = 2'-O-methyluridine-3'-phosphate
  modified_base 13: mod_base = OTHER; note = 2'-O-methylcytidine-3'-phosphate
  modified_base 14: mod_base = OTHER; note = 2'-O-methyladenosine-3'-phosphate
  modified_base 15: mod_base = OTHER; note = 2'-O-methyladenosine-3'-phosphate
  modified_base 16: mod_base = OTHER; note = 2'-O-methylguanosine-3'-phosphate
  modified_base 17: mod_base = OTHER; note = 2'-O-methyluridine-3'-phosphate
  modified_base 18: mod_base = OTHER; note = 2'-O-methyluridine-3'-phosphate
  modified_base 19: mod_base = OTHER; note = 2'-O-methylguanosine-3'-phosphate
  modified_base 20: mod_base = OTHER; note = 2'-O-methylguanosine-3'-phosphate
  modified_base 21: mod_base = OTHER; note = 2'-O-methyluridine-3'-phosphate N-[tris(GalNAc-alkyl)-amidodecanoyl)]-4-hydroxyprolinol (Hyp-(GalNAc-alkyl)3)
agtcgtttcattcaagttggt

SEQ ID NO: 242 - RNA, 21 nt, synthetic construct
  misc_feature 1..21: note = Description of Artificial Sequence: Synthetic oligonucleotide
  source 1..21: mol_type = other RNA
  modified_base 1: mod_base = OTHER; note = 2'-O-methyladenosine-3'-phosphorothioate
  modified_base 2: mod_base = OTHER; note = 2'-O-methylcytidine-3'-phosphorothioate
  modified_base 3: mod_base = OTHER; note = 2'-O-methyluridine-3'-phosphate
  modified_base 4: mod_base = OTHER; note = 2'-O-methylcytidine-3'-phosphate
  modified_base 5: mod_base = OTHER; note = 2'-O-methylguanosine-3'-phosphate
  modified_base 6: mod_base = OTHER; note = 2'-O-methyladenosine-3'-phosphate
  modified_base 7: mod_base = OTHER; note = 2'-fluoroguanosine-3'-phosphate
  modified_base 8: mod_base = OTHER; note = 2'-O-methylcytidine-3'-phosphate
  modified_base 9: mod_base = OTHER; note = 2'-fluorouridine-3'-phosphate
  modified_base 10: mod_base = OTHER; note = 2'-fluorouridine-3'-phosphate
  modified_base 11: mod_base = OTHER; note = 2'-fluorouridine-3'-phosphate
  modified_base 12: mod_base = OTHER; note = 2'-O-methylguanosine-3'-phosphate
  modified_base 13: mod_base = OTHER; note = 2'-O-methyladenosine-3'-phosphate
  modified_base 14: mod_base = OTHER; note = 2'-O-methylguanosine-3'-phosphate
  modified_base 15: mod_base = OTHER; note = 2'-O-methylguanosine-3'-phosphate
  modified_base 16: mod_base = OTHER; note = 2'-O-methylcytidine-3'-phosphate
  modified_base 17: mod_base = OTHER; note = 2'-O-methyluridine-3'-phosphate
  modified_base 18: mod_base = OTHER; note = 2'-O-methyluridine-3'-phosphate
  modified_base 19: mod_base = OTHER; note = 2'-O-methylcytidine-3'-phosphate
  modified_base 20: mod_base = OTHER; note = 2'-O-methylcytidine-3'-phosphate
  modified_base 21: mod_base = OTHER; note = 2'-O-methyluridine-3'-phosphate N-[tris(GalNAc-alkyl)-amidodecanoyl)]-4-hydroxyprolinol (Hyp-(GalNAc-alkyl)3)
actcgagctttgaggcttcct

SEQ ID NO: 243 - RNA, 21 nt, synthetic construct
  misc_feature 1..21: note = Description of Artificial Sequence: Synthetic oligonucleotide
  source 1..21: mol_type = other RNA
  modified_base 1: mod_base = OTHER; note = 2'-O-methylguanosine-3'-phosphorothioate
  modified_base 2: mod_base = OTHER; note = 2'-O-methyladenosine-3'-phosphorothioate
  modified_base 3: mod_base = OTHER; note = 2'-O-methyladenosine-3'-phosphate
  modified_base 4: mod_base = OTHER; note = 2'-O-methylcytidine-3'-phosphate
  modified_base 5: mod_base = OTHER; note = 2'-O-methyladenosine-3'-phosphate
  modified_base 6: mod_base = OTHER; note = 2'-O-methyladenosine-3'-phosphate
  modified_base 7: mod_base = OTHER; note = 2'-fluorocytidine-3'-phosphate
  modified_base 8: mod_base = OTHER; note = 2'-O-methyluridine-3'-phosphate
  modified_base 9: mod_base = OTHER; note = 2'-fluorocytidine-3'-phosphate
  modified_base 10: mod_base = OTHER; note = 2'-fluoroguanosine-3'-phosphate
  modified_base 11: mod_base = OTHER; note = 2'-fluoroadenosine-3'-phosphate
  modified_base 12: mod_base = OTHER; note = 2'-O-methylguanosine-3'-phosphate
  modified_base 13: mod_base = OTHER; note = 2'-O-methylcytidine-3'-phosphate
  modified_base 14: mod_base = OTHER; note = 2'-O-methyluridine-3'-phosphate
  modified_base 15: mod_base = OTHER; note = 2'-O-methyluridine-3'-phosphate
  modified_base 16: mod_base = OTHER; note = 2'-O-methyluridine-3'-phosphate
  modified_base 17: mod_base = OTHER; note = 2'-O-methylguanosine-3'-phosphate
  modified_base 18: mod_base = OTHER; note = 2'-O-methyladenosine-3'-phosphate
  modified_base 19: mod_base = OTHER; note = 2'-O-methylguanosine-3'-phosphate
  modified_base 20: mod_base = OTHER; note = 2'-O-methylguanosine-3'-phosphate
  modified_base 21: mod_base = OTHER; note = 2'-O-methyluridine-3'-phosphate N-[tris(GalNAc-alkyl)-amidodecanoyl)]-4-hydroxyprolinol (Hyp-(GalNAc-alkyl)3)
gaacaactcgagctttgaggt

SEQ ID NO: 244 - RNA, 21 nt, synthetic construct
  misc_feature 1..21: note = Description of Artificial Sequence: Synthetic oligonucleotide
  source 1..21: mol_type = other RNA
  modified_base 1: mod_base = OTHER; note = 2'-O-methyluridine-3'-phosphorothioate
  modified_base 2: mod_base = OTHER; note = 2'-O-methylguanosine-3'-phosphorothioate
  modified_base 3: mod_base = OTHER; note = 2'-O-methylguanosine-3'-phosphate
  modified_base 4: mod_base = OTHER; note = 2'-O-methyluridine-3'-phosphate
  modified_base 5: mod_base = OTHER; note = 2'-O-methylguanosine-3'-phosphate
  modified_base 6: mod_base = OTHER; note = 2'-O-methylcytidine-3'-phosphate
  modified_base 7: mod_base = OTHER; note = 2'-fluorouridine-3'-phosphate
  modified_base 8: mod_base = OTHER; note = 2'-O-methyladenosine-3'-phosphate
  modified_base 9: mod_base = OTHER; note = 2'-fluoroguanosine-3'-phosphate
  modified_base 10: mod_base = OTHER; note = 2'-fluoroadenosine-3'-phosphate
  modified_base 11: mod_base = OTHER; note = 2'-fluorouridine-3'-phosphate
  modified_base 12: mod_base = OTHER; note = 2'-O-methylguanosine-3'-phosphate
  modified_base 13: mod_base = OTHER; note = 2'-O-methylguanosine-3'-phosphate
  modified_base 14: mod_base = OTHER; note = 2'-O-methyladenosine-3'-phosphate
  modified_base 15: mod_base = OTHER; note = 2'-O-methyluridine-3'-phosphate
  modified_base 16: mod_base = OTHER; note = 2'-O-methylcytidine-3'-phosphate
  modified_base 17: mod_base = OTHER; note = 2'-O-methyladenosine-3'-phosphate
  modified_base 18: mod_base = OTHER; note = 2'-O-methylguanosine-3'-phosphate
  modified_base 19: mod_base = OTHER; note = 2'-O-methyladenosine-3'-phosphate
  modified_base 20: mod_base = OTHER; note = 2'-O-methylcytidine-3'-phosphate
  modified_base 21: mod_base = OTHER; note = 2'-O-methyluridine-3'-phosphate N-[tris(GalNAc-alkyl)-amidodecanoyl)]-4-hydroxyprolinol (Hyp-(GalNAc-alkyl)3)
tggtgctagatggatcagact

SEQ ID NO: 245 - RNA, 21 nt, synthetic construct
  misc_feature 1..21: note = Description of Artificial Sequence: Synthetic oligonucleotide
  source 1..21: mol_type = other RNA
  modified_base 1: mod_base = OTHER; note = 2'-O-methylguanosine-3'-phosphorothioate
  modified_base 2: mod_base = OTHER; note = 2'-O-methyluridine-3'-phosphorothioate
  modified_base 3: mod_base = OTHER; note = 2'-O-methylguanosine-3'-phosphate
  modified_base 4: mod_base = OTHER; note = 2'-O-methyluridine-3'-phosphate
  modified_base 5: mod_base = OTHER; note = 2'-O-methylcytidine-3'-phosphate
  modified_base 6: mod_base = OTHER; note = 2'-O-methyladenosine-3'-phosphate
  modified_base 7: mod_base = OTHER; note = 2'-fluoroguanosine-3'-phosphate
  modified_base 8: mod_base = OTHER; note = 2'-O-methylguanosine-3'-phosphate
  modified_base 9: mod_base = OTHER; note = 2'-fluoroadenosine-3'-phosphate
  modified_base 10: mod_base = OTHER; note = 2'-fluoroadenosine-3'-phosphate
  modified_base 11: mod_base = OTHER; note = 2'-fluoroguanosine-3'-phosphate
  modified_base 12: mod_base = OTHER; note = 2'-O-methylguanosine-3'-phosphate
  modified_base 13: mod_base = OTHER; note = 2'-O-methyluridine-3'-phosphate
  modified_base 14: mod_base = OTHER; note = 2'-O-methylguanosine-3'-phosphate
  modified_base 15: mod_base = OTHER; note = 2'-O-methylguanosine-3'-phosphate
  modified_base 16: mod_base = OTHER; note = 2'-O-methylcytidine-3'-phosphate
  modified_base 17: mod_base = OTHER; note = 2'-O-methyluridine-3'-phosphate
  modified_base 18: mod_base = OTHER; note = 2'-O-methylcytidine-3'-phosphate
  modified_base 19: mod_base = OTHER; note = 2'-O-methyluridine-3'-phosphate
  modified_base 20: mod_base = OTHER; note = 2'-O-methyluridine-3'-phosphate
  modified_base 21: mod_base = OTHER; note = 2'-O-methyluridine-3'-phosphate N-[tris(GalNAc-alkyl)-amidodecanoyl)]-4-hydroxyprolinol (Hyp-(GalNAc-alkyl)3)
gtgtcaggaaggtggctcttt

SEQ ID NO: 246 - RNA, 21 nt, synthetic construct
  misc_feature 1..21: note = Description of Artificial Sequence: Synthetic oligonucleotide
  source 1..21: mol_type = other RNA
  modified_base 1: mod_base = OTHER; note = 2'-O-methylcytidine-3'-phosphorothioate
  modified_base 2: mod_base = OTHER; note = 2'-O-methyluridine-3'-phosphorothioate
  modified_base 3: mod_base = OTHER; note = 2'-O-methylguanosine-3'-phosphate
  modified_base 4: mod_base = OTHER; note = 2'-O-methyladenosine-3'-phosphate
  modified_base 5: mod_base = OTHER; note = 2'-O-methyluridine-3'-phosphate
  modified_base 6: mod_base = OTHER; note = 2'-O-methylguanosine-3'-phosphate
  modified_base 7: mod_base = OTHER; note = 2'-fluoroguanosine-3'-phosphate
  modified_base 8: mod_base = OTHER; note = 2'-O-methyladenosine-3'-phosphate
  modified_base 9: mod_base = OTHER; note = 2'-fluorouridine-3'-phosphate
  modified_base 10: mod_base = OTHER; note = 2'-fluorouridine-3'-phosphate
  modified_base 11: mod_base = OTHER; note = 2'-fluoroguanosine-3'-phosphate
  modified_base 12: mod_base = OTHER; note = 2'-O-methylcytidine-3'-phosphate
  modified_base 13: mod_base = OTHER; note = 2'-O-methyladenosine-3'-phosphate
  modified_base 14: mod_base = OTHER; note = 2'-O-methylcytidine-3'-phosphate
  modified_base 15: mod_base = OTHER; note = 2'-O-methyladenosine-3'-phosphate
  modified_base 16: mod_base = OTHER; note = 2'-O-methyladenosine-3'-phosphate
  modified_base 17: mod_base = OTHER; note = 2'-O-methylcytidine-3'-phosphate
  modified_base 18: mod_base = OTHER; note = 2'-O-methyladenosine-3'-phosphate
  modified_base 19: mod_base = OTHER; note = 2'-O-methyluridine-3'-phosphate
  modified_base 20: mod_base = OTHER; note = 2'-O-methylguanosine-3'-phosphate
  modified_base 21: mod_base = OTHER; note = 2'-O-methyluridine-3'-phosphate N-[tris(GalNAc-alkyl)-amidodecanoyl)]-4-hydroxyprolinol (Hyp-(GalNAc-alkyl)3)
ctgatggattgcacaacatgt

SEQ ID NO: 247 - RNA, 21 nt, synthetic construct
  misc_feature 1..21: note = Description of Artificial Sequence: Synthetic oligonucleotide
  source 1..21: mol_type = other RNA
  modified_base 1: mod_base = OTHER; note = 2'-O-methylcytidine-3'-phosphorothioate
  modified_base 2: mod_base = OTHER; note = 2'-O-methyladenosine-3'-phosphorothioate
  modified_base 3: mod_base = OTHER; note = 2'-O-methylguanosine-3'-phosphate
  modified_base 4: mod_base = OTHER; note = 2'-O-methyladenosine-3'-phosphate
  modified_base 5: mod_base = OTHER; note = 2'-O-methylcytidine-3'-phosphate
  modified_base 6: mod_base = OTHER; note = 2'-O-methyluridine-3'-phosphate
  modified_base 7: mod_base = OTHER; note = 2'-fluoroadenosine-3'-phosphate
  modified_base 8: mod_base = OTHER; note = 2'-O-methyluridine-3'-phosphate
  modified_base 9: mod_base = OTHER; note = 2'-fluorocytidine-3'-phosphate
  modified_base 10: mod_base = OTHER; note = 2'-fluoroadenosine-3'-phosphate
  modified_base 11: mod_base = OTHER; note = 2'-fluoroguanosine-3'-phosphate
  modified_base 12: mod_base = OTHER; note = 2'-O-methylguanosine-3'-phosphate
  modified_base 13: mod_base = OTHER; note = 2'-O-methylcytidine-3'-phosphate
  modified_base 14: mod_base = OTHER; note = 2'-O-methylcytidine-3'-phosphate
  modified_base 15: mod_base = OTHER; note = 2'-O-methylcytidine-3'-phosphate
  modified_base 16: mod_base = OTHER; note = 2'-O-methyladenosine-3'-phosphate
  modified_base 17: mod_base = OTHER; note = 2'-O-methyluridine-3'-phosphate
  modified_base 18: mod_base = OTHER; note = 2'-O-methyluridine-3'-phosphate
  modified_base 19: mod_base = OTHER; note = 2'-O-methyluridine-3'-phosphate
  modified_base 20: mod_base = OTHER; note = 2'-O-methylguanosine-3'-phosphate
  modified_base 21: mod_base = OTHER; note = 2'-O-methyluridine-3'-phosphate N-[tris(GalNAc-alkyl)-amidodecanoyl)]-4-hydroxyprolinol (Hyp-(GalNAc-alkyl)3)
cagactatcaggcccatttgt

SEQ ID NO: 248 - RNA, 21 nt, synthetic construct
  misc_feature 1..21: note = Description of Artificial Sequence: Synthetic oligonucleotide
  source 1..21: mol_type = other RNA
  modified_base 1: mod_base = OTHER; note = 2'-O-methylguanosine-3'-phosphorothioate
  modified_base 2: mod_base = OTHER; note = 2'-O-methyladenosine-3'-phosphorothioate
  modified_base 3: mod_base = OTHER; note = 2'-O-methylcytidine-3'-phosphate
  modified_base 4: mod_base = OTHER; note = 2'-O-methylcytidine-3'-phosphate
  modified_base 5: mod_base = OTHER; note = 2'-O-methyladenosine-3'-phosphate
  modified_base 6: mod_base = OTHER; note = 2'-O-methyluridine-3'-phosphate
  modified_base 7: mod_base = OTHER; note = 2'-fluoroadenosine-3'-phosphate
  modified_base 8: mod_base = OTHER; note = 2'-O-methylguanosine-3'-phosphate
  modified_base 9: mod_base = OTHER; note = 2'-fluoroadenosine-3'-phosphate
  modified_base 10: mod_base = OTHER; note = 2'-fluoroadenosine-3'-phosphate
  modified_base 11: mod_base = OTHER; note = 2'-fluoroguanosine-3'-phosphate
  modified_base 12: mod_base = OTHER; note = 2'-O-methylguanosine-3'-phosphate
  modified_base 13: mod_base = OTHER; note = 2'-O-methyladenosine-3'-phosphate
  modified_base 14: mod_base = OTHER; note = 2'-O-methylguanosine-3'-phosphate
  modified_base 15: mod_base = OTHER; note = 2'-O-methyluridine-3'-phosphate
  modified_base 16: mod_base = OTHER; note = 2'-O-methylcytidine-3'-phosphate
  modified_base 17: mod_base = OTHER; note = 2'-O-methylguanosine-3'-phosphate
  modified_base 18: mod_base = OTHER; note = 2'-O-methyladenosine-3'-phosphate
  modified_base 19: mod_base = OTHER; note = 2'-O-methyluridine-3'-phosphate
  modified_base 20: mod_base = OTHER; note = 2'-O-methylguanosine-3'-phosphate
  modified_base 21: mod_base = OTHER; note = 2'-O-methyluridine-3'-phosphate N-[tris(GalNAc-alkyl)-amidodecanoyl)]-4-hydroxyprolinol (Hyp-(GalNAc-alkyl)3)
gaccatagaaggagtcgatgt

SEQ ID NO: 249 - RNA, 21 nt, synthetic construct
  misc_feature 1..21: note = Description of Artificial Sequence: Synthetic oligonucleotide
  source 1..21: mol_type = other RNA
  modified_base 1: mod_base = OTHER; note = 2'-O-methyladenosine-3'-phosphorothioate
  modified_base 2: mod_base = OTHER; note = 2'-O-methylguanosine-3'-phosphorothioate
  modified_base 3: mod_base = OTHER; note = 2'-O-methylguanosine-3'-phosphate
  modified_base 4: mod_base = OTHER; note = 2'-O-methyladenosine-3'-phosphate
  modified_base 5: mod_base = OTHER; note = 2'-O-methylguanosine-3'-phosphate
  modified_base 6: mod_base = OTHER; note = 2'-O-methylcytidine-3'-phosphate
  modified_base 7: mod_base = OTHER; note = 2'-fluorocytidine-3'-phosphate
  modified_base 8: mod_base = OTHER; note = 2'-O-methyladenosine-3'-phosphate
  modified_base 9: mod_base = OTHER; note = 2'-fluoroadenosine-3'-phosphate
  modified_base 10: mod_base = OTHER; note = 2'-fluoroadenosine-3'-phosphate
  modified_base 11: mod_base = OTHER; note = 2'-fluoroadenosine-3'-phosphate
  modified_base 12: mod_base = OTHER; note = 2'-O-methyladenosine-3'-phosphate
  modified_base 13: mod_base = OTHER; note = 2'-O-methylguanosine-3'-phosphate
  modified_base 14: mod_base = OTHER; note = 2'-O-methyluridine-3'-phosphate
  modified_base 15: mod_base = OTHER; note = 2'-O-methylguanosine-3'-phosphate
  modified_base 16: mod_base = OTHER; note = 2'-O-methyluridine-3'-phosphate
  modified_base 17: mod_base = OTHER; note = 2'-O-methylcytidine-3'-phosphate
  modified_base 18: mod_base = OTHER; note = 2'-O-methyluridine-3'-phosphate
  modified_base 19: mod_base = OTHER; note = 2'-O-methyladenosine-3'-phosphate
  modified_base 20: mod_base = OTHER; note = 2'-O-methylguanosine-3'-phosphate
  modified_base 21: mod_base = OTHER; note = 2'-O-methyluridine-3'-phosphate N-[tris(GalNAc-alkyl)-amidodecanoyl)]-4-hydroxyprolinol (Hyp-(GalNAc-alkyl)3)
aggagccaaaaagtgtctagt

SEQ ID NO: 250 - RNA, 21 nt, synthetic construct
  misc_feature 1..21: note = Description of Artificial Sequence: Synthetic oligonucleotide
  source 1..21: mol_type = other RNA
  modified_base 1: mod_base = OTHER; note = 2'-O-methyladenosine-3'-phosphorothioate
  modified_base 2: mod_base = OTHER; note = 2'-O-methylguanosine-3'-phosphorothioate
  modified_base 3: mod_base = OTHER; note = 2'-O-methyladenosine-3'-phosphate
  modified_base 4: mod_base = OTHER; note = 2'-O-methylcytidine-3'-phosphate
  modified_base 5: mod_base = OTHER; note = 2'-O-methylcytidine-3'-phosphate
  modified_base 6: mod_base = OTHER; note = 2'-O-methyladenosine-3'-phosphate
  modified_base 7: mod_base = OTHER; note = 2'-fluorouridine-3'-phosphate
  modified_base 8: mod_base = OTHER; note = 2'-O-methyladenosine-3'-phosphate
  modified_base 9: mod_base = OTHER; note = 2'-fluoroguanosine-3'-phosphate
  modified_base 10: mod_base = OTHER; note = 2'-fluoroadenosine-3'-phosphate
  modified_base 11: mod_base = OTHER; note = 2'-fluoroadenosine-3'-phosphate
  modified_base 12: mod_base = OTHER; note = 2'-O-methylguanosine-3'-phosphate
  modified_base 13: mod_base = OTHER; note = 2'-O-methylguanosine-3'-phosphate
  modified_base 14: mod_base = OTHER; note = 2'-O-methyladenosine-3'-phosphate
  modified_base 15: mod_base = OTHER; note = 2'-O-methylguanosine-3'-phosphate
  modified_base 16: mod_base = OTHER; note = 2'-O-methyluridine-3'-phosphate
  modified_base 17: mod_base = OTHER; note = 2'-O-methylcytidine-3'-phosphate
  modified_base 18: mod_base = OTHER; note = 2'-O-methylguanosine-3'-phosphate
  modified_base 19: mod_base = OTHER; note = 2'-O-methyladenosine-3'-phosphate
  modified_base 20: mod_base = OTHER; note = 2'-O-methyluridine-3'-phosphate
  modified_base 21: mod_base = OTHER; note = 2'-O-methyluridine-3'-phosphate N-[tris(GalNAc-alkyl)-amidodecanoyl)]-4-hydroxyprolinol (Hyp-(GalNAc-alkyl)3)
agaccatagaaggagtcgatt

SEQ ID NO: 251 - RNA, 21 nt, synthetic construct
  misc_feature 1..21: note = Description of Artificial Sequence: Synthetic oligonucleotide
  source 1..21: mol_type = other RNA
  modified_base 1: mod_base = OTHER; note = 2'-O-methyladenosine-3'-phosphorothioate
  modified_base 2: mod_base = OTHER; note = 2'-O-methyladenosine-3'-phosphorothioate
  modified_base 3: mod_base = OTHER; note = 2'-O-methylguanosine-3'-phosphate
  modified_base 4: mod_base = OTHER; note = 2'-O-methyluridine-3'-phosphate
  modified_base 5: mod_base = OTHER; note = 2'-O-methyluridine-3'-phosphate
  modified_base 6: mod_base = OTHER; note = 2'-O-methylguanosine-3'-phosphate
  modified_base 7: mod_base = OTHER; note = 2'-fluoroadenosine-3'-phosphate
  modified_base 8: mod_base = OTHER; note = 2'-O-methyladenosine-3'-phosphate
  modified_base 9: mod_base = OTHER; note = 2'-fluoroguanosine-3'-phosphate
  modified_base 10: mod_base = OTHER; note = 2'-fluorouridine-3'-phosphate
  modified_base 11: mod_base = OTHER; note = 2'-fluorocytidine-3'-phosphate
  modified_base 12: mod_base = OTHER; note = 2'-O-methyladenosine-3'-phosphate
  modified_base 13: mod_base = OTHER; note = 2'-O-methylguanosine-3'-phosphate
  modified_base 14: mod_base = OTHER; note = 2'-O-methylguanosine-3'-phosphate
  modified_base 15: mod_base = OTHER; note = 2'-O-methylguanosine-3'-phosphate
  modified_base 16: mod_base = OTHER; note = 2'-O-methyladenosine-3'-phosphate
  modified_base 17: mod_base = OTHER; note = 2'-O-methylcytidine-3'-phosphate
  modified_base 18: mod_base = OTHER; note = 2'-O-methyluridine-3'-phosphate
  modified_base 19: mod_base = OTHER; note = 2'-O-methyladenosine-3'-phosphate
  modified_base 20: mod_base = OTHER; note = 2'-O-methyladenosine-3'-phosphate
  modified_base 21: mod_base = OTHER; note = 2'-O-methyluridine-3'-phosphate N-[tris(GalNAc-alkyl)-amidodecanoyl)]-4-hydroxyprolinol (Hyp-(GalNAc-alkyl)3)
aagttgaagtcagggactaat

SEQ ID NO: 252 - RNA, 21 nt, synthetic construct
  misc_feature 1..21: note = Description of Artificial Sequence: Synthetic oligonucleotide
  source 1..21: mol_type = other RNA
  modified_base 1: mod_base = OTHER; note = 2'-O-methylguanosine-3'-phosphorothioate
  modified_base 2: mod_base = OTHER; note = 2'-O-methyladenosine-3'-phosphorothioate
  modified_base 3: mod_base = OTHER; note = 2'-O-methylguanosine-3'-phosphate
  modified_base 4: mod_base = OTHER; note = 2'-O-methylcytidine-3'-phosphate
  modified_base 5: mod_base = OTHER; note = 2'-O-methyluridine-3'-phosphate
  modified_base 6: mod_base = OTHER; note = 2'-O-methyluridine-3'-phosphate
  modified_base 7: mod_base = OTHER; note = 2'-fluorouridine-3'-phosphate
  modified_base 8: mod_base = OTHER; note = 2'-O-methylguanosine-3'-phosphate
  modified_base 9: mod_base = OTHER; note = 2'-fluoroadenosine-3'-phosphate
  modified_base 10: mod_base = OTHER; note = 2'-fluoroguanosine-3'-phosphate
  modified_base 11: mod_base = OTHER; note = 2'-fluoroguanosine-3'-phosphate
  modified_base 12: mod_base = OTHER; note = 2'-O-methylcytidine-3'-phosphate
  modified_base 13: mod_base = OTHER; note = 2'-O-methyluridine-3'-phosphate
  modified_base 14: mod_base = OTHER; note = 2'-O-methyluridine-3'-phosphate
  modified_base 15: mod_base = OTHER; note = 2'-O-methylcytidine-3'-phosphate
  modified_base 16: mod_base = OTHER; note = 2'-O-methylcytidine-3'-phosphate
  modified_base 17: mod_base = OTHER; note = 2'-O-methyluridine-3'-phosphate
  modified_base 18: mod_base = OTHER; note = 2'-O-methylcytidine-3'-phosphate
  modified_base 19: mod_base = OTHER; note = 2'-O-methylcytidine-3'-phosphate
  modified_base 20: mod_base = OTHER; note = 2'-O-methyladenosine-3'-phosphate
  modified_base 21: mod_base = OTHER; note = 2'-O-methyluridine-3'-phosphate N-[tris(GalNAc-alkyl)-amidodecanoyl)]-4-hydroxyprolinol (Hyp-(GalNAc-alkyl)3)
gagctttgaggcttcctccat

SEQ ID NO: 253 - RNA, 21 nt, synthetic construct
  misc_feature 1..21: note = Description of Artificial Sequence: Synthetic oligonucleotide
  source 1..21: mol_type = other RNA
  modified_base 1: mod_base = OTHER; note = 2'-O-methyluridine-3'-phosphorothioate
  modified_base 2: mod_base = OTHER; note = 2'-O-methylcytidine-3'-phosphorothioate
  modified_base 3: mod_base = OTHER; note = 2'-O-methyladenosine-3'-phosphate
  modified_base 4: mod_base = OTHER; note = 2'-O-methyladenosine-3'-phosphate
  modified_base 5: mod_base = OTHER; note = 2'-O-methyluridine-3'-phosphate
  modified_base 6: mod_base = OTHER; note = 2'-O-methyluridine-3'-phosphate
  modified_base 7: mod_base = OTHER; note = 2'-fluoroadenosine-3'-phosphate
  modified_base 8: mod_base = OTHER; note = 2'-O-methyluridine-3'-phosphate
  modified_base 9: mod_base = OTHER; note = 2'-fluoroguanosine-3'-phosphate
  modified_base 10: mod_base = OTHER; note = 2'-fluoroadenosine-3'-phosphate
  modified_base 11: mod_base = OTHER; note = 2'-fluoroadenosine-3'-phosphate
  modified_base 12: mod_base = OTHER; note = 2'-O-methylguanosine-3'-phosphate
  modified_base 13: mod_base = OTHER; note = 2'-O-methyladenosine-3'-phosphate
  modified_base 14: mod_base = OTHER; note = 2'-O-methylcytidine-3'-phosphate
  modified_base 15: mod_base = OTHER; note = 2'-O-methylcytidine-3'-phosphate
  modified_base 16: mod_base = OTHER; note = 2'-O-methyladenosine-3'-phosphate
  modified_base 17: mod_base = OTHER; note = 2'-O-methylcytidine-3'-phosphate
  modified_base 18: mod_base = OTHER; note = 2'-O-methyladenosine-3'-phosphate
  modified_base 19: mod_base = OTHER; note = 2'-O-methyladenosine-3'-phosphate
  modified_base 20: mod_base = OTHER; note = 2'-O-methylguanosine-3'-phosphate
  modified_base 21: mod_base = OTHER; note = 2'-O-methyluridine-3'-phosphate N-[tris(GalNAc-alkyl)-amidodecanoyl)]-4-hydroxyprolinol (Hyp-(GalNAc-alkyl)3)
tcaattatgaagaccacaagt

SEQ ID NO: 254 - RNA, 21 nt, synthetic construct
  misc_feature 1..21: note = Description of Artificial Sequence: Synthetic oligonucleotide
  source 1..21: mol_type = other RNA
  modified_base 1: mod_base = OTHER; note = 2'-O-methyladenosine-3'-phosphorothioate
  modified_base 2: mod_base = OTHER; note = 2'-O-methyladenosine-3'-phosphorothioate
  modified_base 3: mod_base = OTHER; note = 2'-O-methylguanosine-3'-phosphate
  modified_base 4: mod_base = OTHER; note = 2'-O-methyladenosine-3'-phosphate
  modified_base 5: mod_base = OTHER; note = 2'-O-methylcytidine-3'-phosphate
  modified_base 6: mod_base = OTHER; note = 2'-O-methyluridine-3'-phosphate
  modified_base 7: mod_base = OTHER; note = 2'-fluorocytidine-3'-phosphate
  modified_base 8: mod_base = OTHER; note = 2'-O-methylcytidine-3'-phosphate
  modified_base 9: mod_base = OTHER; note = 2'-fluorouridine-3'-phosphate
  modified_base 10: mod_base = OTHER; note = 2'-fluorouridine-3'-phosphate
  modified_base 11: mod_base = OTHER; note = 2'-fluorocytidine-3'-phosphate
  modified_base 12: mod_base = OTHER; note = 2'-O-methyladenosine-3'-phosphate
  modified_base 13: mod_base = OTHER; note = 2'-O-methyluridine-3'-phosphate
  modified_base 14: mod_base = OTHER; note = 2'-O-methylguanosine-3'-phosphate
  modified_base 15: mod_base = OTHER; note = 2'-O-methyluridine-3'-phosphate
  modified_base 16: mod_base = OTHER; note = 2'-O-methyladenosine-3'-phosphate
  modified_base 17: mod_base = OTHER; note = 2'-O-methylcytidine-3'-phosphate
  modified_base 18: mod_base = OTHER; note = 2'-O-methylguanosine-3'-phosphate
  modified_base 19: mod_base = OTHER; note = 2'-O-methyladenosine-3'-phosphate
  modified_base 20: mod_base = OTHER; note = 2'-O-methylcytidine-3'-phosphate
  modified_base 21: mod_base = OTHER; note = 2'-O-methyluridine-3'-phosphate N-[tris(GalNAc-alkyl)-amidodecanoyl)]-4-hydroxyprolinol (Hyp-(GalNAc-alkyl)3)
aagactccttcatgtacgact

SEQ ID NO: 255 - RNA, 21 nt, synthetic construct
  misc_feature 1..21: note = Description of Artificial Sequence: Synthetic oligonucleotide
  source 1..21: mol_type = other RNA
  modified_base 1: mod_base = OTHER; note = 2'-O-methylcytidine-3'-phosphorothioate
  modified_base 2: mod_base = OTHER; note = 2'-O-methyluridine-3'-phosphorothioate
  modified_base 3: mod_base = OTHER; note = 2'-O-methyluridine-3'-phosphate
  modified_base 4: mod_base = OTHER; note = 2'-O-methyluridine-3'-phosphate
  modified_base 5: mod_base = OTHER; note = 2'-O-methylguanosine-3'-phosphate
  modified_base 6: mod_base = OTHER; note = 2'-O-methyladenosine-3'-phosphate
  modified_base 7: mod_base = OTHER; note = 2'-fluoroguanosine-3'-phosphate
  modified_base 8: mod_base = OTHER; note = 2'-O-methylguanosine-3'-phosphate
  modified_base 9: mod_base = OTHER; note = 2'-fluorocytidine-3'-phosphate
  modified_base 10: mod_base = OTHER; note = 2'-fluorouridine-3'-phosphate
  modified_base 11: mod_base = OTHER; note = 2'-fluorouridine-3'-phosphate
  modified_base 12: mod_base = OTHER; note = 2'-O-methylcytidine-3'-phosphate
  modified_base 13: mod_base = OTHER; note = 2'-O-methylcytidine-3'-phosphate
  modified_base 14: mod_base = OTHER; note = 2'-O-methyluridine-3'-phosphate
  modified_base 15: mod_base = OTHER; note = 2'-O-methylcytidine-3'-phosphate
  modified_base 16: mod_base = OTHER; note = 2'-O-methylcytidine-3'-phosphate
  modified_base 17: mod_base = OTHER; note = 2'-O-methyladenosine-3'-phosphate
  modified_base 18: mod_base = OTHER; note = 2'-O-methyladenosine-3'-phosphate
  modified_base 19: mod_base = OTHER; note = 2'-O-methylcytidine-3'-phosphate
  modified_base 20: mod_base = OTHER; note = 2'-O-methyluridine-3'-phosphate
  modified_base 21: mod_base = OTHER; note = 2'-O-methyluridine-3'-phosphate N-[tris(GalNAc-alkyl)-amidodecanoyl)]-4-hydroxyprolinol (Hyp-(GalNAc-alkyl)3)
ctttgaggcttcctccaactt

SEQ ID NO: 256 - RNA, 21 nt, synthetic construct
  misc_feature 1..21: note = Description of Artificial Sequence: Synthetic oligonucleotide
  source 1..21: mol_type = other RNA
  modified_base 1: mod_base = OTHER; note = 2'-O-methyladenosine-3'-phosphorothioate
  modified_base 2: mod_base = OTHER; note = 2'-O-methylguanosine-3'-phosphorothioate
  modified_base 3: mod_base = OTHER; note = 2'-O-methylguanosine-3'-phosphate
  modified_base 4: mod_base = OTHER; note = 2'-O-methylcytidine-3'-phosphate
  modified_base 5: mod_base = OTHER; note = 2'-O-methyluridine-3'-phosphate
  modified_base 6: mod_base = OTHER; note = 2'-O-methyluridine-3'-phosphate
  modified_base 7: mod_base = OTHER; note = 2'-fluorocytidine-3'-phosphate
  modified_base 8: mod_base = OTHER; note = 2'-O-methylcytidine-3'-phosphate
  modified_base 9: mod_base = OTHER; note = 2'-fluorouridine-3'-phosphate
  modified_base 10: mod_base = OTHER; note = 2'-fluorocytidine-3'-phosphate
  modified_base 11: mod_base = OTHER; note = 2'-fluorocytidine-3'-phosphate
  modified_base 12: mod_base = OTHER; note = 2'-O-methyladenosine-3'-phosphate
  modified_base 13: mod_base = OTHER; note = 2'-O-methyladenosine-3'-phosphate
  modified_base 14: mod_base = OTHER; note = 2'-O-methylcytidine-3'-phosphate
  modified_base 15: mod_base = OTHER; note = 2'-O-methyluridine-3'-phosphate
  modified_base 16: mod_base = OTHER; note = 2'-O-methyladenosine-3'-phosphate
  modified_base 17: mod_base = OTHER; note = 2'-O-methylcytidine-3'-phosphate
  modified_base 18: mod_base = OTHER; note = 2'-O-methylcytidine-3'-phosphate
  modified_base 19: mod_base = OTHER; note = 2'-O-methyladenosine-3'-phosphate
  modified_base 20: mod_base = OTHER; note = 2'-O-methylcytidine-3'-phosphate
  modified_base 21: mod_base = OTHER; note = 2'-O-methyluridine-3'-phosphate N-[tris(GalNAc-alkyl)-amidodecanoyl)]-4-hydroxyprolinol (Hyp-(GalNAc-alkyl)3)
aggcttcctccaactaccact

SEQ ID NO: 257 - RNA, 21 nt, synthetic construct
  misc_feature 1..21: note = Description of Artificial Sequence: Synthetic oligonucleotide
  source 1..21: mol_type = other RNA
  modified_base 1: mod_base = OTHER; note = 2'-O-methyladenosine-3'-phosphorothioate
  modified_base 2: mod_base = OTHER; note = 2'-O-methylguanosine-3'-phosphorothioate
  modified_base 3: mod_base = OTHER; note = 2'-O-methyladenosine-3'-phosphate
  modified_base 4: mod_base = OTHER; note = 2'-O-methylcytidine-3'-phosphate
  modified_base 5: mod_base = OTHER; note = 2'-O-methyladenosine-3'-phosphate
  modified_base 6: mod_base = OTHER; note = 2'-O-methylguanosine-3'-phosphate
  modified_base 7: mod_base = OTHER; note = 2'-fluorocytidine-3'-phosphate
  modified_base 8: mod_base = OTHER; note = 2'-O-methylguanosine-3'-phosphate
  modified_base 9: mod_base = OTHER; note = 2'-fluoroadenosine-3'-phosphate
  modified_base 10: mod_base = OTHER; note = 2'-fluorouridine-3'-phosphate
  modified_base 11: mod_base = OTHER; note = 2'-fluorocytidine-3'-phosphate
  modified_base 12: mod_base = OTHER; note = 2'-O-methyluridine-3'-phosphate
  modified_base 13: mod_base = OTHER; note = 2'-O-methylguanosine-3'-phosphate
  modified_base 14: mod_base = OTHER; note = 2'-O-methyluridine-3'-phosphate
  modified_base 15: mod_base = OTHER; note = 2'-O-methylguanosine-3'-phosphate
  modified_base 16: mod_base = OTHER; note = 2'-O-methyladenosine-3'-phosphate
  modified_base 17: mod_base = OTHER; note = 2'-O-methylcytidine-3'-phosphate
  modified_base 18: mod_base = OTHER; note = 2'-O-methyladenosine-3'-phosphate
  modified_base 19: mod_base = OTHER; note = 2'-O-methyladenosine-3'-phosphate
  modified_base 20: mod_base = OTHER; note = 2'-O-methylcytidine-3'-phosphate
  modified_base 21: mod_base = OTHER; note = 2'-O-methyluridine-3'-phosphate N-[tris(GalNAc-alkyl)-amidodecanoyl)]-4-hydroxyprolinol (Hyp-(GalNAc-alkyl)3)
agacagcgatctgtgacaact

SEQ ID NO: 258 - RNA, 21 nt, synthetic construct
  misc_feature 1..21: note = Description of Artificial Sequence: Synthetic oligonucleotide
  source 1..21: mol_type = other RNA
  modified_base 1: mod_base = OTHER; note = 2'-O-methylcytidine-3'-phosphorothioate
  modified_base 2: mod_base = OTHER; note = 2'-O-methyladenosine-3'-phosphorothioate
  modified_base 3: mod_base = OTHER; note = 2'-O-methylguanosine-3'-phosphate
  modified_base 4: mod_base = OTHER; note = 2'-O-methylguanosine-3'-phosphate
  modified_base 5: mod_base = OTHER; note = 2'-O-methylcytidine-3'-phosphate
  modified_base 6: mod_base = OTHER; note = 2'-O-methyluridine-3'-phosphate
  modified_base 7: mod_base = OTHER; note = 2'-fluoroadenosine-3'-phosphate
  modified_base 8: mod_base = OTHER; note = 2'-O-methyluridine-3'-phosphate
  modified_base 9: mod_base = OTHER; note = 2'-fluoroguanosine-3'-phosphate
  modified_base 10: mod_base = OTHER; note = 2'-fluoroadenosine-3'-phosphate
  modified_base 11: mod_base = OTHER; note = 2'-fluorocytidine-3'-phosphate
  modified_base 12: mod_base = OTHER; note = 2'-O-methyladenosine-3'-phosphate
  modified_base 13: mod_base = OTHER; note = 2'-O-methyladenosine-3'-phosphate
  modified_base 14: mod_base = OTHER; note = 2'-O-methyladenosine-3'-phosphate
  modified_base 15: mod_base = OTHER; note = 2'-O-methylguanosine-3'-phosphate
  modified_base 16: mod_base = OTHER; note = 2'-O-methyluridine-3'-phosphate
  modified_base 17: mod_base = OTHER; note = 2'-O-methylcytidine-3'-phosphate
  modified_base 18: mod_base = OTHER; note = 2'-O-methyladenosine-3'-phosphate
  modified_base 19: mod_base = OTHER; note = 2'-O-methyladenosine-3'-phosphate
  modified_base 20: mod_base = OTHER; note = 2'-O-methylguanosine-3'-phosphate
  modified_base 21: mod_base = OTHER; note = 2'-O-methyluridine-3'-phosphate N-[tris(GalNAc-alkyl)-amidodecanoyl)]-4-hydroxyprolinol (Hyp-(GalNAc-alkyl)3)
caggctatgacaaagtcaagt

SEQ ID NO: 259 - RNA, 21 nt, synthetic construct
  misc_feature 1..21: note = Description of Artificial Sequence: Synthetic oligonucleotide
  source 1..21: mol_type = other RNA
  modified_base 1: mod_base = OTHER; note = 2'-O-methylguanosine-3'-phosphorothioate
  modified_base 2: mod_base = OTHER; note = 2'-O-methylcytidine-3'-phosphorothioate
  modified_base 3: mod_base = OTHER; note = 2'-O-methyluridine-3'-phosphate
  modified_base 4: mod_base = OTHER; note = 2'-O-methyluridine-3'-phosphate
  modified_base 5: mod_base = OTHER; note = 2'-O-methyluridine-3'-phosphate
  modified_base 6: mod_base = OTHER; note = 2'-O-methylguanosine-3'-phosphate
  modified_base 7: mod_base = OTHER; note = 2'-fluoroadenosine-3'-phosphate
  modified_base 8: mod_base = OTHER; note = 2'-O-methylguanosine-3'-phosphate
  modified_base 9: mod_base = OTHER; note = 2'-fluoroguanosine-3'-phosphate
  modified_base 10: mod_base = OTHER; note = 2'-fluorocytidine-3'-phosphate
  modified_base 11: mod_base = OTHER; note = 2'-fluorouridine-3'-phosphate
  modified_base 12: mod_base = OTHER; note = 2'-O-methyluridine-3'-phosphate
  modified_base 13: mod_base = OTHER; note = 2'-O-methylcytidine-3'-phosphate
  modified_base 14: mod_base = OTHER; note = 2'-O-methylcytidine-3'-phosphate
  modified_base 15: mod_base = OTHER; note = 2'-O-methyluridine-3'-phosphate
  modified_base 16: mod_base = OTHER; note = 2'-O-methylcytidine-3'-phosphate
  modified_base 17: mod_base = OTHER; note = 2'-O-methylcytidine-3'-phosphate
  modified_base 18: mod_base = OTHER; note = 2'-O-methyladenosine-3'-phosphate
  modified_base 19: mod_base = OTHER; note = 2'-O-methyladenosine-3'-phosphate
  modified_base 20: mod_base = OTHER; note = 2'-O-methylcytidine-3'-phosphate
  modified_base 21: mod_base = OTHER; note = 2'-O-methyluridine-3'-phosphate N-[tris(GalNAc-alkyl)-amidodecanoyl)]-4-hydroxyprolinol (Hyp-(GalNAc-alkyl)3)
gctttgaggcttcctccaact

SEQ ID NO: 260 - RNA, 21 nt, synthetic construct
  misc_feature 1..21: note = Description of Artificial Sequence: Synthetic oligonucleotide
  source 1..21: mol_type = other RNA
  modified_base 1: mod_base = OTHER; note = 2'-O-methyluridine-3'-phosphorothioate
  modified_base 2: mod_base = OTHER; note = 2'-O-methyladenosine-3'-phosphorothioate
  modified_base 3: mod_base = OTHER; note = 2'-O-methyluridine-3'-phosphate
  modified_base 4: mod_base = OTHER; note = 2'-O-methylguanosine-3'-phosphate
  modified_base 5: mod_base = OTHER; note = 2'-O-methyladenosine-3'-phosphate
  modified_base 6: mod_base = OTHER; note = 2'-O-methylcytidine-3'-phosphate
  modified_base 7: mod_base = OTHER; note = 2'-fluorouridine-3'-phosphate
  modified_base 8: mod_base = OTHER; note = 2'-O-methyladenosine-3'-phosphate
  modified_base 9: mod_base = OTHER; note = 2'-fluorouridine-3'-phosphate
  modified_base 10: mod_base = OTHER; note = 2'-fluoroguanosine-3'-phosphate
  modified_base 11: mod_base = OTHER; note = 2'-fluoroadenosine-3'-phosphate
  modified_base 12: mod_base = OTHER; note = 2'-O-methylcytidine-3'-phosphate
  modified_base 13: mod_base = OTHER; note = 2'-O-methylguanosine-3'-phosphate
  modified_base 14: mod_base = OTHER; note = 2'-O-methyluridine-3'-phosphate
  modified_base 15: mod_base = OTHER; note = 2'-O-methyluridine-3'-phosphate
  modified_base 16: mod_base = OTHER; note = 2'-O-methylguanosine-3'-phosphate
  modified_base 17: mod_base = OTHER; note = 2'-O-methylcytidine-3'-phosphate
  modified_base 18: mod_base = OTHER; note = 2'-O-methylcytidine-3'-phosphate
  modified_base 19: mod_base = OTHER; note = 2'-O-methylcytidine-3'-phosphate
  modified_base 20: mod_base = OTHER; note = 2'-O-methyluridine-3'-phosphate
  modified_base 21: mod_base = OTHER; note = 2'-O-methyluridine-3'-phosphate N-[tris(GalNAc-alkyl)-amidodecanoyl)]-4-hydroxyprolinol (Hyp-(GalNAc-alkyl)3)
tatgactatgacgttgccctt

SEQ ID NO: 261 - RNA, 21 nt, synthetic construct
  misc_feature 1..21: note = Description of Artificial Sequence: Synthetic oligonucleotide
  source 1..21: mol_type = other RNA
  modified_base 1: mod_base = OTHER; note = 2'-O-methyluridine-3'-phosphorothioate
  modified_base 2: mod_base = OTHER; note = 2'-O-methylcytidine-3'-phosphorothioate
  modified_base 3: mod_base = OTHER; note = 2'-O-methyluridine-3'-phosphate
  modified_base 4: mod_base = OTHER; note = 2'-O-methylguanosine-3'-phosphate
  modified_base 5: mod_base = OTHER; note = 2'-O-methylcytidine-3'-phosphate
  modified_base 6: mod_base = OTHER; note = 2'-O-methyladenosine-3'-phosphate
  modified_base 7: mod_base = OTHER; note = 2'-fluoroadenosine-3'-phosphate
  modified_base 8: mod_base = OTHER; note = 2'-O-methyladenosine-3'-phosphate
  modified_base 9: mod_base = OTHER; note = 2'-fluoroadenosine-3'-phosphate
  modified_base 10: mod_base = OTHER; note = 2'-fluoroadenosine-3'-phosphate
  modified_base 11: mod_base = OTHER; note = 2'-fluorocytidine-3'-phosphate
  modified_base 12: mod_base = OTHER; note = 2'-O-methylcytidine-3'-phosphate
  modified_base 13: mod_base = OTHER; note = 2'-O-methyladenosine-3'-phosphate
  modified_base 14: mod_base = OTHER; note = 2'-O-methylguanosine-3'-phosphate
  modified_base 15: mod_base = OTHER; note = 2'-O-methyladenosine-3'-phosphate
  modified_base 16: mod_base = OTHER; note = 2'-O-methyladenosine-3'-phosphate
  modified_base 17: mod_base = OTHER; note = 2'-O-methylguanosine-3'-phosphate
  modified_base 18: mod_base = OTHER; note = 2'-O-methylcytidine-3'-phosphate
  modified_base 19: mod_base = OTHER; note = 2'-O-methylguanosine-3'-phosphate
  modified_base 20: mod_base = OTHER; note = 2'-O-methylguanosine-3'-phosphate
  modified_base 21: mod_base = OTHER; note = 2'-O-methyluridine-3'-phosphate N-[tris(GalNAc-alkyl)-amidodecanoyl)]-4-hydroxyprolinol (Hyp-(GalNAc-alkyl)3)
tctgcaaaaaccagaagcggt

SEQ ID NO: 262 - RNA, 21 nt, synthetic construct
  misc_feature 1..21: note = Description of Artificial Sequence: Synthetic oligonucleotide
  source 1..21: mol_type = other RNA
  modified_base 1: mod_base = OTHER; note = 2'-O-methyluridine-3'-phosphorothioate
  modified_base 2: mod_base = OTHER; note = 2'-O-methylcytidine-3'-phosphorothioate
  modified_base 3: mod_base = OTHER; note = 2'-O-methyluridine-3'-phosphate
  modified_base 4: mod_base = OTHER; note = 2'-O-methylcytidine-3'-phosphate
  modified_base 5: mod_base = OTHER; note = 2'-O-methyluridine-3'-phosphate
  modified_base 6: mod_base = OTHER; note = 2'-O-methyluridine-3'-phosphate
  modified_base 7: mod_base = OTHER; note = 2'-fluorouridine-3'-phosphate
  modified_base 8: mod_base = OTHER; note = 2'-O-methylcytidine-3'-phosphate
  modified_base 9: mod_base = OTHER; note = 2'-fluorocytidine-3'-phosphate
  modified_base 10: mod_base = OTHER; note = 2'-fluoroadenosine-3'-phosphate
  modified_base 11: mod_base = OTHER; note = 2'-fluorocytidine-3'-phosphate
  modified_base 12: mod_base = OTHER; note = 2'-O-methyluridine-3'-phosphate
  modified_base 13: mod_base = OTHER; note = 2'-O-methylguanosine-3'-phosphate
  modified_base 14: mod_base = OTHER; note = 2'-O-methylcytidine-3'-phosphate
  modified_base 15: mod_base = OTHER; note = 2'-O-methyluridine-3'-phosphate
  modified_base 16: mod_base = OTHER; note = 2'-O-methyladenosine-3'-phosphate
  modified_base 17: mod_base = OTHER; note = 2'-O-methyluridine-3'-phosphate
  modified_base 18: mod_base = OTHER; note = 2'-O-methylguanosine-3'-phosphate
  modified_base 19: mod_base = OTHER; note = 2'-O-methyladenosine-3'-phosphate
  modified_base 20: mod_base = OTHER; note = 2'-O-methylcytidine-3'-phosphate
  modified_base 21: mod_base = OTHER; note = 2'-O-methyluridine-3'-phosphate N-[tris(GalNAc-alkyl)-amidodecanoyl)]-4-hydroxyprolinol (Hyp-(GalNAc-alkyl)3)
tctctttccactgctatgact

SEQ ID NO: 263 - RNA, 21 nt, synthetic construct
  misc_feature 1..21: note = Description of Artificial Sequence: Synthetic oligonucleotide
  source 1..21: mol_type = other RNA
  modified_base 1: mod_base = OTHER; note = 2'-O-methyladenosine-3'-phosphorothioate
  modified_base 2: mod_base = OTHER; note = 2'-O-methyluridine-3'-phosphorothioate
  modified_base 3: mod_base = OTHER; note = 2'-O-methylguanosine-3'-phosphate
  modified_base 4: mod_base = OTHER; note = 2'-O-methyladenosine-3'-phosphate
  modified_base 5: mod_base = OTHER; note = 2'-O-methylcytidine-3'-phosphate
  modified_base 6: mod_base = OTHER; note = 2'-O-methylguanosine-3'-phosphate
  modified_base 7: mod_base = OTHER; note = 2'-fluoroguanosine-3'-phosphate
  modified_base 8: mod_base = OTHER; note = 2'-O-methyluridine-3'-phosphate
  modified_base 9: mod_base = OTHER; note = 2'-fluorouridine-3'-phosphate
  modified_base 10: mod_base = OTHER; note = 2'-fluoroadenosine-3'-phosphate
  modified_base 11: mod_base = OTHER; note = 2'-fluorocytidine-3'-phosphate
  modified_base 12: mod_base = OTHER; note = 2'-O-methyladenosine-3'-phosphate
  modified_base 13: mod_base = OTHER; note = 2'-O-methylcytidine-3'-phosphate
  modified_base 14: mod_base = OTHER; note = 2'-O-methyluridine-3'-phosphate
  modified_base 15: mod_base = OTHER; note = 2'-O-methylcytidine-3'-phosphate
  modified_base 16: mod_base = OTHER; note = 2'-O-methyluridine-3'-phosphate
  modified_base 17: mod_base = OTHER; note = 2'-O-methylcytidine-3'-phosphate
  modified_base 18: mod_base = OTHER; note = 2'-O-methylcytidine-3'-phosphate
  modified_base 19: mod_base = OTHER; note = 2'-O-methylguanosine-3'-phosphate
  modified_base 20: mod_base = OTHER; note = 2'-O-methylguanosine-3'-phosphate
  modified_base 21: mod_base = OTHER; note = 2'-O-methyluridine-3'-phosphate N-[tris(GalNAc-alkyl)-amidodecanoyl)]-4-hydroxyprolinol (Hyp-(GalNAc-alkyl)3)
atgacggttacactctccggt

SEQ ID NO: 264 - RNA, 21 nt, synthetic construct
  misc_feature 1..21: note = Description of Artificial Sequence: Synthetic oligonucleotide
  source 1..21: mol_type = other RNA
  modified_base 1: mod_base = OTHER; note = 2'-O-methylcytidine-3'-phosphorothioate
  modified_base 2: mod_base = OTHER; note = 2'-O-methyladenosine-3'-phosphorothioate
  modified_base 3: mod_base = OTHER; note = 2'-O-methyladenosine-3'-phosphate
  modified_base 4: mod_base = OTHER; note = 2'-O-methylguanosine-3'-phosphate
  modified_base 5: mod_base = OTHER; note = 2'-O-methylguanosine-3'-phosphate
  modified_base 6: mod_base = OTHER; note = 2'-O-methylguanosine-3'-phosphate
  modified_base 7: mod_base = OTHER; note = 2'-fluoroadenosine-3'-phosphate
  modified_base 8: mod_base = OTHER; note = 2'-O-methylguanosine-3'-phosphate
  modified_base 9: mod_base = OTHER; note = 2'-fluoroguanosine-3'-phosphate
  modified_base 10: mod_base = OTHER; note = 2'-fluoroadenosine-3'-phosphate
  modified_base 11: mod_base = OTHER; note = 2'-fluorouridine-3'-phosphate
  modified_base 12: mod_base = OTHER; note = 2'-O-methyluridine-3'-phosphate
  modified_base 13: mod_base = OTHER; note = 2'-O-methyladenosine-3'-phosphate
  modified_base 14: mod_base = OTHER; note = 2'-O-methyluridine-3'-phosphate
  modified_base 15: mod_base = OTHER; note = 2'-O-methylcytidine-3'-phosphate
  modified_base 16: mod_base = OTHER; note = 2'-O-methyluridine-3'-phosphate
  modified_base 17: mod_base = OTHER; note = 2'-O-methylguanosine-3'-phosphate
  modified_base 18: mod_base = OTHER; note = 2'-O-methylguanosine-3'-phosphate
  modified_base 19: mod_base = OTHER; note = 2'-O-methyladenosine-3'-phosphate
  modified_base 20: mod_base = OTHER; note = 2'-O-methyluridine-3'-phosphate
  modified_base 21: mod_base = OTHER; note = 2'-O-methyluridine-3'-phosphate N-[tris(GalNAc-alkyl)-amidodecanoyl)]-4-hydroxyprolinol (Hyp-(GalNAc-alkyl)3)
caagggaggattatctggatt

SEQ ID NO: 265 - RNA, 21 nt, synthetic construct
  misc_feature 1..21: note = Description of Artificial Sequence: Synthetic oligonucleotide
  source 1..21: mol_type = other RNA
  modified_base 1: mod_base = OTHER; note = 2'-O-methylcytidine-3'-phosphorothioate
  modified_base 2: mod_base = OTHER; note = 2'-O-methyladenosine-3'-phosphorothioate
  modified_base 3: mod_base = OTHER; note = 2'-O-methylguanosine-3'-phosphate
  modified_base 4: mod_base = OTHER; note = 2'-O-methylcytidine-3'-phosphate
  modified_base 5: mod_base = OTHER; note = 2'-O-methylguanosine-3'-phosphate
  modified_base 6: mod_base = OTHER; note = 2'-O-methyladenosine-3'-phosphate
  modified_base 7: mod_base = OTHER; note = 2'-fluorouridine-3'-phosphate
  modified_base 8: mod_base = OTHER; note = 2'-O-methylcytidine-3'-phosphate
  modified_base 9: mod_base = OTHER; note = 2'-fluorouridine-3'-phosphate
  modified_base 10: mod_base = OTHER; note = 2'-fluoroguanosine-3'-phosphate
  modified_base 11: mod_base = OTHER; note = 2'-fluorouridine-3'-phosphate
  modified_base 12: mod_base = OTHER; note = 2'-O-methylguanosine-3'-phosphate
  modified_base 13: mod_base = OTHER; note = 2'-O-methyladenosine-3'-phosphate
  modified_base 14: mod_base = OTHER; note = 2'-O-methylcytidine-3'-phosphate
  modified_base 15: mod_base = OTHER; note = 2'-O-methyladenosine-3'-phosphate
  modified_base 16: mod_base = OTHER; note = 2'-O-methyladenosine-3'-phosphate
  modified_base 17: mod_base = OTHER; note = 2'-O-methylcytidine-3'-phosphate
  modified_base 18: mod_base = OTHER; note = 2'-O-methylguanosine-3'-phosphate
  modified_base 19: mod_base = OTHER; note = 2'-O-methylguanosine-3'-phosphate
  modified_base 20: mod_base = OTHER; note = 2'-O-methyladenosine-3'-phosphate
  modified_base 21: mod_base = OTHER; note = 2'-O-methyluridine-3'-phosphate N-[tris(GalNAc-alkyl)-amidodecanoyl)]-4-hydroxyprolinol (Hyp-(GalNAc-alkyl)3)
cagcgatctgtgacaacggat

SEQ ID NO: 266 - RNA, 21 nt, synthetic construct
  misc_feature 1..21: note = Description of Artificial Sequence: Synthetic oligonucleotide
  source 1..21: mol_type = other RNA
  modified_base 1: mod_base = OTHER; note = 2'-O-methylguanosine-3'-phosphorothioate
  modified_base 2: mod_base = OTHER; note = 2'-O-methyladenosine-3'-phosphorothioate
  modified_base 3: mod_base = OTHER; note = 2'-O-methylguanosine-3'-phosphate
  modified_base 4: mod_base = OTHER; note = 2'-O-methylguanosine-3'-phosphate
  modified_base 5: mod_base = OTHER; note = 2'-O-methylcytidine-3'-phosphate
  modified_base 6: mod_base = OTHER; note = 2'-O-methyluridine-3'-phosphate
  modified_base 7: mod_base = OTHER; note = 2'-fluorouridine-3'-phosphate
  modified_base 8: mod_base = OTHER; note = 2'-O-methylcytidine-3'-phosphate
  modified_base 9: mod_base = OTHER; note = 2'-fluorocytidine-3'-phosphate
  modified_base 10: mod_base = OTHER; note = 2'-fluorouridine-3'-phosphate
  modified_base 11: mod_base = OTHER; note = 2'-fluorocytidine-3'-phosphate
  modified_base 12: mod_base = OTHER; note = 2'-O-methylcytidine-3'-phosphate
  modified_base 13: mod_base = OTHER; note = 2'-O-methyladenosine-3'-phosphate
  modified_base 14: mod_base = OTHER; note = 2'-O-methyladenosine-3'-phosphate
  modified_base 15: mod_base = OTHER; note = 2'-O-methylcytidine-3'-phosphate
  modified_base 16: mod_base = OTHER; note = 2'-O-methyluridine-3'-phosphate
  modified_base 17: mod_base = OTHER; note = 2'-O-methyladenosine-3'-phosphate
  modified_base 18: mod_base = OTHER; note = 2'-O-methylcytidine-3'-phosphate
  modified_base 19: mod_base = OTHER; note = 2'-O-methylcytidine-3'-phosphate
  modified_base 20: mod_base = OTHER; note = 2'-O-methyladenosine-3'-phosphate
  modified_base 21: mod_base = OTHER; note = 2'-O-methyluridine-3'-phosphate N-[tris(GalNAc-alkyl)-amidodecanoyl)]-4-hydroxyprolinol (Hyp-(GalNAc-alkyl)3)
gaggcttcctccaactaccat

SEQ ID NO: 267 - RNA, 21 nt, synthetic construct
  misc_feature 1..21: note = Description of Artificial Sequence: Synthetic oligonucleotide
  source 1..21: mol_type = other RNA
  modified_base 1: mod_base = OTHER; note = 2'-O-methyluridine-3'-phosphorothioate
  modified_base 2: mod_base = OTHER; note = 2'-O-methyladenosine-3'-phosphorothioate
  modified_base 3: mod_base = OTHER; note = 2'-O-methyluridine-3'-phosphate
  modified_base 4: mod_base = OTHER; note = 2'-O-methylguanosine-3'-phosphate
  modified_base 5: mod_base = OTHER; note = 2'-O-methyladenosine-3'-phosphate
  modified_base 6: mod_base = OTHER; note = 2'-O-methylcytidine-3'-phosphate
  modified_base 7: mod_base = OTHER; note = 2'-fluoroguanosine-3'-phosphate
  modified_base 8: mod_base = OTHER; note = 2'-O-methylguanosine-3'-phosphate
  modified_base 9: mod_base = OTHER; note = 2'-fluorouridine-3'-phosphate
  modified_base 10: mod_base = OTHER; note = 2'-fluorouridine-3'-phosphate
  modified_base 11: mod_base = OTHER; note = 2'-fluoroadenosine-3'-phosphate
  modified_base 12: mod_base = OTHER; note = 2'-O-methylcytidine-3'-phosphate
  modified_base 13: mod_base = OTHER; note = 2'-O-methyladenosine-3'-phosphate
  modified_base 14: mod_base = OTHER; note = 2'-O-methylcytidine-3'-phosphate
  modified_base 15: mod_base = OTHER; note = 2'-O-methyluridine-3'-phosphate
  modified_base 16: mod_base = OTHER; note = 2'-O-methylcytidine-3'-phosphate
  modified_base 17: mod_base = OTHER; note = 2'-O-methyluridine-3'-phosphate
  modified_base 18: mod_base = OTHER; note = 2'-O-methylcytidine-3'-phosphate
  modified_base 19: mod_base = OTHER; note = 2'-O-methylcytidine-3'-phosphate
  modified_base 20: mod_base = OTHER; note = 2'-O-methylguanosine-3'-phosphate
  modified_base 21: mod_base = OTHER; note = 2'-O-methyluridine-3'-phosphate N-[tris(GalNAc-alkyl)-amidodecanoyl)]-4-hydroxyprolinol (Hyp-(GalNAc-alkyl)3)
tatgacggttacactctccgt

SEQ ID NO: 268 - RNA, 21 nt, synthetic construct
  misc_feature 1..21: note = Description of Artificial Sequence: Synthetic oligonucleotide
  source 1..21: mol_type = other RNA
  modified_base 1: mod_base = OTHER; note = 2'-O-methyladenosine-3'-phosphorothioate
  modified_base 2: mod_base = OTHER; note = 2'-O-methyladenosine-3'-phosphorothioate
  modified_base 3: mod_base = OTHER; note = 2'-O-methylcytidine-3'-phosphate
  modified_base 4: mod_base = OTHER; note = 2'-O-methyladenosine-3'-phosphate
  modified_base 5: mod_base = OTHER; note = 2'-O-methyladenosine-3'-phosphate
  modified_base 6: mod_base = OTHER; note = 2'-O-methylcytidine-3'-phosphate
  modified_base 7: mod_base = OTHER; note = 2'-fluorouridine-3'-phosphate
  modified_base 8: mod_base = OTHER; note = 2'-O-methylcytidine-3'-phosphate
  modified_base 9: mod_base = OTHER; note = 2'-fluoroguanosine-3'-phosphate
  modified_base 10: mod_base = OTHER; note = 2'-fluoroadenosine-3'-phosphate
  modified_base 11: mod_base = OTHER; note = 2'-fluoroguanosine-3'-phosphate
  modified_base 12: mod_base = OTHER; note = 2'-O-methylcytidine-3'-phosphate
  modified_base 13: mod_base = OTHER; note = 2'-O-methyluridine-3'-phosphate
  modified_base 14: mod_base = OTHER; note = 2'-O-methyluridine-3'-phosphate
  modified_base 15: mod_base = OTHER; note = 2'-O-methyluridine-3'-phosphate
  modified_base 16: mod_base = OTHER; note = 2'-O-methylguanosine-3'-phosphate
  modified_base 17: mod_base = OTHER; note = 2'-O-methyladenosine-3'-phosphate
  modified_base 18: mod_base = OTHER; note = 2'-O-methylguanosine-3'-phosphate
  modified_base 19: mod_base = OTHER; note = 2'-O-methylguanosine-3'-phosphate
  modified_base 20: mod_base = OTHER; note = 2'-O-methylcytidine-3'-phosphate
  modified_base 21: mod_base = OTHER; note = 2'-O-methyluridine-3'-phosphate N-[tris(GalNAc-alkyl)-amidodecanoyl)]-4-hydroxyprolinol (Hyp-(GalNAc-alkyl)3)
aacaactcgagctttgaggct

SEQ ID NO: 269 - RNA, 21 nt, synthetic construct
  misc_feature 1..21: note = Description of Artificial Sequence: Synthetic oligonucleotide
  source 1..21: mol_type = other RNA
  modified_base 1: mod_base = OTHER; note = 2'-O-methyluridine-3'-phosphorothioate
  modified_base 2: mod_base = OTHER; note = 2'-O-methylcytidine-3'-phosphorothioate
  modified_base 3: mod_base = OTHER; note = 2'-O-methyluridine-3'-phosphate
  modified_base 4: mod_base = OTHER; note = 2'-O-methyluridine-3'-phosphate
  modified_base 5: mod_base = OTHER; note = 2'-O-methyluridine-3'-phosphate
  modified_base 6: mod_base = OTHER; note = 2'-O-methylcytidine-3'-phosphate
  modified_base 7: mod_base = OTHER; note = 2'-fluorocytidine-3'-phosphate
  modified_base 8: mod_base = OTHER; note = 2'-O-methyladenosine-3'-phosphate
  modified_base 9: mod_base = OTHER; note = 2'-fluorocytidine-3'-phosphate
  modified_base 10: mod_base = OTHER; note = 2'-fluorouridine-3'-phosphate
  modified_base 11: mod_base = OTHER; note = 2'-fluoroguanosine-3'-phosphate
  modified_base 12: mod_base = OTHER; note = 2'-O-methylcytidine-3'-phosphate
  modified_base 13: mod_base = OTHER; note = 2'-O-methyluridine-3'-phosphate
  modified_base 14: mod_base = OTHER; note = 2'-O-methyladenosine-3'-phosphate
  modified_base 15: mod_base = OTHER; note = 2'-O-methyluridine-3'-phosphate
  modified_base 16: mod_base = OTHER; note = 2'-O-methylguanosine-3'-phosphate
  modified_base 17: mod_base = OTHER; note = 2'-O-methyladenosine-3'-phosphate
  modified_base 18: mod_base = OTHER; note = 2'-O-methylcytidine-3'-phosphate
  modified_base 19: mod_base = OTHER; note = 2'-O-methylguanosine-3'-phosphate
  modified_base 20: mod_base = OTHER; note = 2'-O-methylguanosine-3'-phosphate
  modified_base 21: mod_base = OTHER; note = 2'-O-methyluridine-3'-phosphate N-[tris(GalNAc-alkyl)-amidodecanoyl)]-4-hydroxyprolinol (Hyp-(GalNAc-alkyl)3)
tctttccactgctatgacggt

SEQ ID NO: 270 - RNA, 21 nt, synthetic construct
  misc_feature 1..21: note = Description of Artificial Sequence: Synthetic oligonucleotide
  source 1..21: mol_type = other RNA
  modified_base 1: mod_base = OTHER; note = 2'-O-methyladenosine-3'-phosphorothioate
  modified_base 2: mod_base = OTHER; note = 2'-O-methyladenosine-3'-phosphorothioate
  modified_base 3: mod_base = OTHER; note = 2'-O-methylcytidine-3'-phosphate
  modified_base 4: mod_base = OTHER; note = 2'-O-methyladenosine-3'-phosphate
  modified_base 5: mod_base = OTHER; note = 2'-O-methyluridine-3'-phosphate
  modified_base 6: mod_base = OTHER; note = 2'-O-methylguanosine-3'-phosphate
  modified_base 7: mod_base = OTHER; note = 2'-fluorouridine-3'-phosphate
  modified_base 8: mod_base = OTHER; note = 2'-O-methylguanosine-3'-phosphate
  modified_base 9: mod_base = OTHER; note = 2'-fluorouridine-3'-phosphate
  modified_base 10: mod_base = OTHER; note = 2'-fluorouridine-3'-phosphate
  modified_base 11: mod_base = OTHER; note = 2'-fluorocytidine-3'-phosphate
  modified_base 12: mod_base = OTHER; note = 2'-O-methyladenosine-3'-phosphate
  modified_base 13: mod_base = OTHER; note = 2'-O-methyladenosine-3'-phosphate
  modified_base 14: mod_base = OTHER; note = 2'-O-methyladenosine-3'-phosphate
  modified_base 15: mod_base = OTHER; note = 2'-O-methylguanosine-3'-phosphate
  modified_base 16: mod_base = OTHER; note = 2'-O-methyluridine-3'-phosphate
  modified_base 17: mod_base = OTHER; note = 2'-O-methylcytidine-3'-phosphate
  modified_base 18: mod_base = OTHER; note = 2'-O-methyladenosine-3'-phosphate
  modified_base 19: mod_base = OTHER; note = 2'-O-methyladenosine-3'-phosphate
  modified_base 20: mod_base = OTHER; note = 2'-O-methylguanosine-3'-phosphate
  modified_base 21: mod_base = OTHER; note = 2'-O-methyluridine-3'-phosphate N-[tris(GalNAc-alkyl)-amidodecanoyl)]-4-hydroxyprolinol (Hyp-(GalNAc-alkyl)3)
aacatgtgttcaaagtcaagt

SEQ ID NO: 271 - RNA, 21 nt, synthetic construct
  misc_feature 1..21: note = Description of Artificial Sequence: Synthetic oligonucleotide
  source 1..21: mol_type = other RNA
  modified_base 1: mod_base = OTHER; note = 2'-O-methylcytidine-3'-phosphorothioate
  modified_base 2: mod_base = OTHER; note = 2'-O-methylcytidine-3'-phosphorothioate
  modified_base 3: mod_base = OTHER; note = 2'-O-methyluridine-3'-phosphate
  modified_base 4: mod_base = OTHER; note = 2'-O-methyluridine-3'-phosphate
  modified_base 5: mod_base = OTHER; note = 2'-O-methylcytidine-3'-phosphate
  modified_base 6: mod_base = OTHER; note = 2'-O-methyladenosine-3'-phosphate
  modified_base 7: mod_base = OTHER; note = 2'-fluoroguanosine-3'-phosphate
  modified_base 8: mod_base = OTHER; note = 2'-O-methylguanosine-3'-phosphate
  modified_base 9: mod_base = OTHER; note = 2'-fluorocytidine-3'-phosphate
  modified_base 10: mod_base = OTHER; note = 2'-fluorouridine-3'-phosphate
  modified_base 11: mod_base = OTHER; note = 2'-fluorocytidine-3'-phosphate
  modified_base 12: mod_base = OTHER; note = 2'-O-methylcytidine-3'-phosphate
  modified_base 13: mod_base = OTHER; note = 2'-O-methyladenosine-3'-phosphate
  modified_base 14: mod_base = OTHER; note = 2'-O-methyluridine-3'-phosphate
  modified_base 15: mod_base = OTHER; note = 2'-O-methylguanosine-3'-phosphate
  modified_base 16: mod_base = OTHER; note = 2'-O-methyladenosine-3'-phosphate
  modified_base 17: mod_base = OTHER; note = 2'-O-methyladenosine-3'-phosphate
  modified_base 18: mod_base = OTHER; note = 2'-O-methylcytidine-3'-phosphate
  modified_base 19: mod_base = OTHER; note = 2'-O-methyladenosine-3'-phosphate
  modified_base 20: mod_base = OTHER; note = 2'-O-methyluridine-3'-phosphate
  modified_base 21: mod_base = OTHER; note = 2'-O-methyluridine-3'-phosphate N-[tris(GalNAc-alkyl)-amidodecanoyl)]-4-hydroxyprolinol (Hyp-(GalNAc-alkyl)3)
ccttcaggctccatgaacatt

SEQ ID NO: 272 - RNA, 21 nt, synthetic construct
  misc_feature 1..21: note = Description of Artificial Sequence: Synthetic oligonucleotide
  source 1..21: mol_type = other RNA
  modified_base 1: mod_base = OTHER; note = 2'-O-methylguanosine-3'-phosphorothioate
  modified_base 2: mod_base = OTHER; note = 2'-O-methyladenosine-3'-phosphorothioate
  modified_base 3: mod_base = OTHER; note = 2'-O-methylguanosine-3'-phosphate
  modified_base 4: mod_base = OTHER; note = 2'-O-methyladenosine-3'-phosphate
  modified_base 5: mod_base = OTHER; note = 2'-O-methyladenosine-3'-phosphate
  modified_base 6: mod_base = OTHER; note = 2'-O-methylguanosine-3'-phosphate
  modified_base 7: mod_base = OTHER; note = 2'-fluorouridine-3'-phosphate
  modified_base 8: mod_base = OTHER; note = 2'-O-methylcytidine-3'-phosphate
  modified_base 9: mod_base = OTHER; note = 2'-fluoroguanosine-3'-phosphate
  modified_base 10: mod_base = OTHER; note = 2'-fluorouridine-3'-phosphate
  modified_base 11: mod_base = OTHER; note = 2'-fluorouridine-3'-phosphate
  modified_base 12: mod_base = OTHER; note = 2'-O-methyluridine-3'-phosphate
  modified_base 13: mod_base = OTHER; note = 2'-O-methylcytidine-3'-phosphate
  modified_base 14: mod_base = OTHER; note = 2'-O-methyladenosine-3'-phosphate
  modified_base 15: mod_base = OTHER; note = 2'-O-methyluridine-3'-phosphate
  modified_base 16: mod_base = OTHER; note = 2'-O-methyluridine-3'-phosphate
  modified_base 17: mod_base = OTHER; note = 2'-O-methylcytidine-3'-phosphate
  modified_base 18: mod_base = OTHER; note = 2'-O-methyladenosine-3'-phosphate
  modified_base 19: mod_base = OTHER; note = 2'-O-methyladenosine-3'-phosphate
  modified_base 20: mod_base = OTHER; note = 2'-O-methylguanosine-3'-phosphate
  modified_base 21: mod_base = OTHER; note = 2'-O-methyluridine-3'-phosphate N-[tris(GalNAc-alkyl)-amidodecanoyl)]-4-hydroxyprolinol (Hyp-(GalNAc-alkyl)3)
gagaagtcgtttcattcaagt

SEQ ID NO: 273 - RNA, 21 nt, synthetic construct
  misc_feature 1..21: note = Description of Artificial Sequence: Synthetic oligonucleotide
  source 1..21: mol_type = other RNA
  modified_base 1: mod_base = OTHER; note = 2'-O-methylguanosine-3'-phosphorothioate
  modified_base 2: mod_base = OTHER; note = 2'-O-methylguanosine-3'-phosphorothioate
  modified_base 3: mod_base = OTHER; note = 2'-O-methylguanosine-3'-phosphate
  modified_base 4: mod_base = OTHER; note = 2'-O-methyluridine-3'-phosphate
  modified_base 5: mod_base = OTHER; note = 2'-O-methyladenosine-3'-phosphate
  modified_base 6: mod_base = OTHER; note = 2'-O-methylcytidine-3'-phosphate
  modified_base 7: mod_base = OTHER; note = 2'-fluorocytidine-3'-phosphate
  modified_base 8: mod_base = OTHER; note = 2'-O-methylguanosine-3'-phosphate
  modified_base 9: mod_base = OTHER; note = 2'-fluoroadenosine-3'-phosphate
  modified_base 10: mod_base = OTHER; note = 2'-fluorouridine-3'-phosphate
  modified_base 11: mod_base = OTHER; note = 2'-fluorouridine-3'-phosphate
  modified_base 12: mod_base = OTHER; note = 2'-O-methyladenosine-3'-phosphate
  modified_base 13: mod_base = OTHER; note = 2'-O-methylcytidine-3'-phosphate
  modified_base 14: mod_base = OTHER; note = 2'-O-methylcytidine-3'-phosphate
  modified_base 15: mod_base = OTHER; note = 2'-O-methyladenosine-3'-phosphate
  modified_base 16: mod_base = OTHER; note = 2'-O-methylcytidine-3'-phosphate
  modified_base 17: mod_base = OTHER; note = 2'-O-methyladenosine-3'-phosphate
  modified_base 18: mod_base = OTHER; note = 2'-O-methyladenosine-3'-phosphate
  modified_base 19: mod_base = OTHER; note = 2'-O-methylguanosine-3'-phosphate
  modified_base 20: mod_base = OTHER; note = 2'-O-methylcytidine-3'-phosphate
  modified_base 21: mod_base = OTHER; note = 2'-O-methyluridine-3'-phosphate N-[tris(GalNAc-alkyl)-amidodecanoyl)]-4-hydroxyprolinol (Hyp-(GalNAc-alkyl)3)
gggtaccgattaccacaagct

SEQ ID NO: 274 - RNA, 21 nt, synthetic construct
  misc_feature 1..21: note = Description of Artificial Sequence: Synthetic oligonucleotide
  source 1..21: mol_type = other RNA
  modified_base 1: mod_base = OTHER; note = 2'-O-methyluridine-3'-phosphorothioate
  modified_base 2: mod_base = OTHER; note = 2'-O-methylguanosine-3'-phosphorothioate
  modified_base 3: mod_base = OTHER; note = 2'-O-methyladenosine-3'-phosphate
  modified_base 4: mod_base = OTHER; note = 2'-O-methyluridine-3'-phosphate
  modified_base 5: mod_base = OTHER; note = 2'-O-methylguanosine-3'-phosphate
  modified_base 6: mod_base = OTHER; note = 2'-O-methylguanosine-3'-phosphate
  modified_base 7: mod_base = OTHER; note = 2'-fluoroadenosine-3'-phosphate
  modified_base 8: mod_base = OTHER; note = 2'-O-methyluridine-3'-phosphate
  modified_base 9: mod_base = OTHER; note = 2'-fluorouridine-3'-phosphate
  modified_base 10: mod_base = OTHER; note = 2'-fluoroguanosine-3'-phosphate
  modified_base 11: mod_base = OTHER; note = 2'-fluorocytidine-3'-phosphate
  modified_base 12: mod_base = OTHER; note = 2'-O-methyladenosine-3'-phosphate
  modified_base 13: mod_base = OTHER; note = 2'-O-methylcytidine-3'-phosphate
  modified_base 14: mod_base = OTHER; note = 2'-O-methyladenosine-3'-phosphate
  modified_base 15: mod_base = OTHER; note = 2'-O-methyladenosine-3'-phosphate
  modified_base 16: mod_base = OTHER; note = 2'-O-methylcytidine-3'-phosphate
  modified_base 17: mod_base = OTHER; note = 2'-O-methyladenosine-3'-phosphate
  modified_base 18: mod_base = OTHER; note = 2'-O-methyluridine-3'-phosphate
  modified_base 19: mod_base = OTHER; note = 2'-O-methylguanosine-3'-phosphate
  modified_base 20: mod_base = OTHER; note = 2'-O-methylguanosine-3'-phosphate
  modified_base 21: mod_base = OTHER; note = 2'-O-methyluridine-3'-phosphate N-[tris(GalNAc-alkyl)-amidodecanoyl)]-4-hydroxyprolinol (Hyp-(GalNAc-alkyl)3)
tgatggattgcacaacatggt

SEQ ID NO: 275 - RNA, 21 nt, synthetic construct
  misc_feature 1..21: note = Description of Artificial Sequence: Synthetic oligonucleotide
  source 1..21: mol_type = other RNA
  modified_base 1: mod_base = OTHER; note = 2'-O-methylcytidine-3'-phosphorothioate
  modified_base 2: mod_base = OTHER; note = 2'-O-methylguanosine-3'-phosphorothioate
  modified_base 3: mod_base = OTHER; note = 2'-O-methyladenosine-3'-phosphate
  modified_base 4: mod_base = OTHER; note = 2'-O-methylguanosine-3'-phosphate
  modified_base 5: mod_base = OTHER; note = 2'-O-methylguanosine-3'-phosphate
  modified_base 6: mod_base = OTHER; note = 2'-O-methylguanosine-3'-phosphate
  modified_base 7: mod_base = OTHER; note = 2'-fluoroadenosine-3'-phosphate
  modified_base 8: mod_base = OTHER; note = 2'-O-methyladenosine-3'-phosphate
  modified_base 9: mod_base = OTHER; note = 2'-fluorocytidine-3'-phosphate
  modified_base 10: mod_base = OTHER; note = 2'-fluoroadenosine-3'-phosphate
  modified_base 11: mod_base = OTHER; note = 2'-fluoroadenosine-3'-phosphate
  modified_base 12: mod_base = OTHER; note = 2'-O-methylcytidine-3'-phosphate
  modified_base 13: mod_base = OTHER; note = 2'-O-methyluridine-3'-phosphate
  modified_base 14: mod_base = OTHER; note = 2'-O-methylcytidine-3'-phosphate
  modified_base 15: mod_base = OTHER; note = 2'-O-methylguanosine-3'-phosphate
  modified_base 16: mod_base = OTHER; note = 2'-O-methyladenosine-3'-phosphate
  modified_base 17: mod_base = OTHER; note = 2'-O-methylguanosine-3'-phosphate
  modified_base 18: mod_base = OTHER; note = 2'-O-methylcytidine-3'-phosphate
  modified_base 19: mod_base = OTHER; note = 2'-O-methyluridine-3'-phosphate
  modified_base 20: mod_base = OTHER; note = 2'-O-methyluridine-3'-phosphate
  modified_base 21: mod_base = OTHER; note = 2'-O-methyluridine-3'-phosphate N-[tris(GalNAc-alkyl)-amidodecanoyl)]-4-hydroxyprolinol (Hyp-(GalNAc-alkyl)3)
cgagggaacaactcgagcttt

SEQ ID NO: 276 - RNA, 21 nt, synthetic construct
  misc_feature 1..21: note = Description of Artificial Sequence: Synthetic oligonucleotide
  source 1..21: mol_type = other RNA
  modified_base 1: mod_base = OTHER; note = 2'-O-methyluridine-3'-phosphorothioate
  modified_base 2: mod_base = OTHER; note = 2'-O-methyluridine-3'-phosphorothioate
  modified_base 3: mod_base = OTHER; note = 2'-O-methyluridine-3'-phosphate
  modified_base 4: mod_base = OTHER; note = 2'-O-methyladenosine-3'-phosphate
  modified_base 5: mod_base = OTHER; note = 2'-O-methyluridine-3'-phosphate
  modified_base 6: mod_base = OTHER; note = 2'-O-methylguanosine-3'-phosphate
  modified_base 7: mod_base = OTHER; note = 2'-fluoroadenosine-3'-phosphate
  modified_base 8: mod_base = OTHER; note = 2'-O-methylcytidine-3'-phosphate
  modified_base 9: mod_base = OTHER; note = 2'-fluorouridine-3'-phosphate
  modified_base 10: mod_base = OTHER; note = 2'-fluoroadenosine-3'-phosphate
  modified_base 11: mod_base = OTHER; note = 2'-fluorouridine-3'-phosphate
  modified_base 12: mod_base = OTHER; note = 2'-O-methylguanosine-3'-phosphate
  modified_base 13: mod_base = OTHER; note = 2'-O-methyladenosine-3'-phosphate
  modified_base 14: mod_base = OTHER; note = 2'-O-methylcytidine-3'-phosphate
  modified_base 15: mod_base = OTHER; note = 2'-O-methylguanosine-3'-phosphate
  modified_base 16: mod_base = OTHER; note = 2'-O-methyluridine-3'-phosphate
  modified_base 17: mod_base = OTHER; note = 2'-O-methyluridine-3'-phosphate
  modified_base 18: mod_base = OTHER; note = 2'-O-methylguanosine-3'-phosphate
  modified_base 19: mod_base = OTHER; note = 2'-O-methylcytidine-3'-phosphate
  modified_base 20: mod_base = OTHER; note = 2'-O-methylcytidine-3'-phosphate
  modified_base 21: mod_base = OTHER; note = 2'-O-methyluridine-3'-phosphate N-[tris(GalNAc-alkyl)-amidodecanoyl)]-4-hydroxyprolinol (Hyp-(GalNAc-alkyl)3)
tttatgactatgacgttgcct

SEQ ID NO: 277 - RNA, 23 nt, synthetic construct
  misc_feature 1..23: note = Description of Artificial Sequence: Synthetic oligonucleotide
  source 1..23: mol_type = other RNA
  modified_base 1: mod_base = OTHER; note = 2'-O-methyladenosine-3'-phosphorothioate
  modified_base 2: mod_base = OTHER; note = 2'-fluoroadenosine-3'-phosphorothioate
  modified_base 3: mod_base = OTHER; note = 2'-O-methylguanosine-3'-phosphate
  modified_base 4: mod_base = OTHER; note = 2'-O-methyluridine-3'-phosphate
  modified_base 5: mod_base = OTHER; note = 2'-O-methyluridine-3'-phosphate
  modified_base 6: mod_base = OTHER; note = 2'-O-methylguanosine-3'-phosphate
  modified_base 7: mod_base = OTHER; note = Adenosine-glycol nucleic acid (GNA)
  modified_base 8: mod_base = OTHER; note = 2'-O-methylcytidine-3'-phosphate
  modified_base 9: mod_base = OTHER; note = 2'-O-methyluridine-3'-phosphate
  modified_base 10: mod_base = OTHER; note = 2'-O-methyladenosine-3'-phosphate
  modified_base 11: mod_base = OTHER; note = 2'-O-methylguanosine-3'-phosphate
  modified_base 12: mod_base = OTHER; note = 2'-O-methyladenosine-3'-phosphate
  modified_base 13: mod_base = OTHER; note = 2'-O-methylcytidine-3'-phosphate
  modified_base 14: mod_base = OTHER; note = 2'-fluoroadenosine-3'-phosphate
  modified_base 15: mod_base = OTHER; note = 2'-O-methylcytidine-3'-phosphate
  modified_base 16: mod_base = OTHER; note = 2'-fluorouridine-3'-phosphate
  modified_base 17: mod_base = OTHER; note = 2'-O-methyluridine-3'-phosphate
  modified_base 18: mod_base = OTHER; note = 2'-O-methyluridine-3'-phosphate
  modified_base 19: mod_base = OTHER; note = 2'-O-methyluridine-3'-phosphate
  modified_base 20: mod_base = OTHER; note = 2'-O-methyluridine-3'-phosphate
  modified_base 21: mod_base = OTHER; note = 2'-O-methylguanosine-3'-phosphorothioate
  modified_base 22: mod_base = OTHER; note = 2'-O-methylguanosine-3'-phosphorothioate
  modified_base 23: mod_base = OTHER; note = 2'-O-methylcytidine-3'-phosphate
aagttgactagacactttttggc

SEQ ID NO: 278 - DNA, 23 bp, synthetic construct
  misc_feature 1..23: note = Description of Artificial Sequence: Synthetic oligonucleotide
  source 1..23: mol_type = other DNA
  modified_base 1: mod_base = OTHER; note = 2'-O-methyladenosine-3'-phosphorothioate
  modified_base 2: mod_base = OTHER; note = 2'-fluoroguanosine-3'-phosphorothioate
  modified_base 3: mod_base = OTHER; note = 2'-O-methyluridine-3'-phosphate
  modified_base 4: mod_base = OTHER; note = 2'-O-methyluridine-3'-phosphate
  modified_base 5: mod_base = OTHER; note = 2'-O-methyluridine-3'-phosphate
  modified_base 6: mod_base = OTHER; note = 2'-O-methyluridine-3'-phosphate
  modified_base 7: mod_base = OTHER; note = Thymidine-glycol nucleic acid (GNA) S-Isomer
  modified_base 8: mod_base = OTHER; note = 2'-O-methylguanosine-3'-phosphate
  modified_base 9: mod_base = OTHER; note = 2'-O-methylcytidine-3'-phosphate
  modified_base 10: mod_base = OTHER; note = 2'-O-methyladenosine-3'-phosphate
  modified_base 11: mod_base = OTHER; note = 2'-O-methylguanosine-3'-phosphate
  modified_base 12: mod_base = OTHER; note = 2'-O-methyladenosine-3'-phosphate
  modified_base 13: mod_base = OTHER; note = 2'-O-methylcytidine-3'-phosphate
  modified_base 14: mod_base = OTHER; note = 2'-fluoroadenosine-3'-phosphate
  modified_base 15: mod_base = OTHER; note = 2'-O-methyluridine-3'-phosphate
  modified_base 16: mod_base = OTHER; note = 2'-fluorocytidine-3'-phosphate
  modified_base 17: mod_base = OTHER; note = 2'-O-methylcytidine-3'-phosphate
  modified_base 18: mod_base = OTHER; note = 2'-O-methyladenosine-3'-phosphate
  modified_base 19: mod_base = OTHER; note = 2'-O-methylcytidine-3'-phosphate
  modified_base 20: mod_base = OTHER; note = 2'-O-methyluridine-3'-phosphate
  modified_base 21: mod_base = OTHER; note = 2'-O-methyladenosine-3'-phosphorothioate
  modified_base 22: mod_base = OTHER; note = 2'-O-methylcytidine-3'-phosphorothioate
  modified_base 23: mod_base = OTHER; note = 2'-O-methyluridine-3'-phosphate
  misc_feature 1..6: note = RNA
  misc_feature 7: note = DNA
  misc_feature 8..23: note = RNA
agtttttgcagacatccactact

SEQ ID NO: 279 - RNA, 23 nt, synthetic construct
  misc_feature 1..23: note = Description of Artificial Sequence: Synthetic oligonucleotide
  source 1..23: mol_type = other RNA
  modified_base 1: mod_base = OTHER; note = 2'-O-methyladenosine-3'-phosphorothioate
  modified_base 2: mod_base = OTHER; note = 2'-fluoroguanosine-3'-phosphorothioate
  modified_base 3: mod_base = OTHER; note = 2'-O-methyluridine-3'-phosphate
  modified_base 4: mod_base = OTHER; note = 2'-O-methylcytidine-3'-phosphate
  modified_base 5: mod_base = OTHER; note = 2'-O-methyladenosine-3'-phosphate
  modified_base 6: mod_base = OTHER; note = 2'-O-methyluridine-3'-phosphate
  modified_base 7: mod_base = OTHER; note = Adenosine-glycol nucleic acid (GNA)
  modified_base 8: mod_base = OTHER; note = 2'-O-methyladenosine-3'-phosphate
  modified_base 9: mod_base = OTHER; note = 2'-O-methyladenosine-3'-phosphate
  modified_base 10: mod_base = OTHER; note = 2'-O-methyladenosine-3'-phosphate
  modified_base 11: mod_base = OTHER; note = 2'-O-methyluridine-3'-phosphate
  modified_base 12: mod_base = OTHER; note = 2'-O-methyluridine-3'-phosphate
  modified_base 13: mod_base = OTHER; note = 2'-O-methylcytidine-3'-phosphate
  modified_base 14: mod_base = OTHER; note = 2'-fluoroadenosine-3'-phosphate
  modified_base 15: mod_base = OTHER; note = 2'-O-methylguanosine-3'-phosphate
  modified_base 16: mod_base = OTHER; note = 2'-fluoroguanosine-3'-phosphate
  modified_base 17: mod_base = OTHER; note = 2'-O-methyladenosine-3'-phosphate
  modified_base 18: mod_base = OTHER; note = 2'-O-methyladenosine-3'-phosphate
  modified_base 19: mod_base = OTHER; note = 2'-O-methyluridine-3'-phosphate
  modified_base 20: mod_base = OTHER; note = 2'-O-methyluridine-3'-phosphate
  modified_base 21: mod_base = OTHER; note = 2'-O-methylcytidine-3'-phosphorothioate
  modified_base 22: mod_base = OTHER; note = 2'-O-methylcytidine-3'-phosphorothioate
  modified_base 23: mod_base = OTHER; note = 2'-O-methyluridine-3'-phosphate
agtcataaaattcaggaattcct

SEQ ID NO: 280 - DNA, 23 bp, synthetic construct
  misc_feature 1..23: note = Description of Artificial Sequence: Synthetic oligonucleotide
  source 1..23: mol_type = other DNA
  modified_base 1: mod_base = OTHER; note = 2'-O-methyladenosine-3'-phosphorothioate
  modified_base 2: mod_base = OTHER; note = 2'-fluorouridine -3'-phosphorothioate
  modified_base 3: mod_base = OTHER; note = 2'-O-methyluridine-3'-phosphate
  modified_base 4: mod_base = OTHER; note = 2'-O-methylguanosine-3'-phosphate
  modified_base 5: mod_base = OTHER; note = 2'-O-methyladenosine-3'-phosphate
  modified_base 6: mod_base = OTHER; note = 2'-O-methylcytidine-3'-phosphate
  modified_base 7: mod_base = OTHER; note = Thymidine-glycol nucleic acid (GNA) S-Isomer
  modified_base 8: mod_base = OTHER; note = 2'-O-methyladenosine-3'-phosphate
  modified_base 9: mod_base = OTHER; note = 2'-O-methylguanosine-3'-phosphate
  modified_base 10: mod_base = OTHER; note = 2'-O-methyladenosine-3'-phosphate
  modified_base 11: mod_base = OTHER; note = 2'-O-methylcytidine-3'-phosphate
  modified_base 12: mod_base = OTHER; note = 2'-O-methyladenosine-3'-phosphate
  modified_base 13: mod_base = OTHER; note = 2'-O-methylcytidine-3'-phosphate
  modified_base 14: mod_base = OTHER; note = 2'-fluorouridine-3'-phosphate
  modified_base 15: mod_base = OTHER; note = 2'-O-methyluridine-3'-phosphate
  modified_base 16: mod_base = OTHER; note = 2'-fluorouridine-3'-phosphate
  modified_base 17: mod_base = OTHER; note = 2'-O-methyluridine-3'-phosphate
  modified_base 18: mod_base = OTHER; note = 2'-O-methyluridine-3'-phosphate
  modified_base 19: mod_base = OTHER; note = 2'-O-methylguanosine-3'-phosphate
  modified_base 20: mod_base = OTHER; note = 2'-O-methylguanosine-3'-phosphate
  modified_base 21: mod_base = OTHER; note = 2'-O-methylcytidine-3'-phosphorothioate
  modified_base 22: mod_base = OTHER; note = 2'-O-methyluridine-3'-phosphorothioate
  modified_base 23: mod_base = OTHER; note = 2'-O-methylcytidine-3'-phosphate
  misc_feature 1..6: note = RNA
  misc_feature 7: note = DNA
  misc_feature 8..23: note = RNA
attgactagacactttttggctc

SEQ ID NO: 281 - RNA, 23 nt, synthetic construct
  misc_feature 1..23: note = Description of Artificial Sequence: Synthetic oligonucleotide
  source 1..23: mol_type = other RNA
  modified_base 1: mod_base = OTHER; note = 2'-O-methyladenosine-3'-phosphorothioate
  modified_base 2: mod_base = OTHER; note = 2'-fluorouridine -3'-phosphorothioate
  modified_base 3: mod_base = OTHER; note = 2'-O-methylguanosine-3'-phosphate
  modified_base 4: mod_base = OTHER; note = 2'-O-methyladenosine-3'-phosphate
  modified_base 5: mod_base = OTHER; note = 2'-O-methyladenosine-3'-phosphate
  modified_base 6: mod_base = OTHER; note = 2'-O-methyladenosine-3'-phosphate
  modified_base 7: mod_base = OTHER; note = Cytidine-glycol nucleic acid (GNA)
  modified_base 8: mod_base = OTHER; note = 2'-O-methylguanosine-3'-phosphate
  modified_base 9: mod_base = OTHER; note = 2'-O-methyladenosine-3'-phosphate
  modified_base 10: mod_base = OTHER; note = 2'-O-methylcytidine-3'-phosphate
  modified_base 11: mod_base = OTHER; note = 2'-O-methyluridine-3'-phosphate
  modified_base 12: mod_base = OTHER; note = 2'-O-methyluridine-3'-phosphate
  modified_base 13: mod_base = OTHER; note = 2'-O-methylcytidine-3'-phosphate
  modified_base 14: mod_base = OTHER; note = 2'-fluorouridine-3'-phosphate
  modified_base 15: mod_base = OTHER; note = 2'-O-methylcytidine-3'-phosphate
  modified_base 16: mod_base = OTHER; note = 2'-fluorouridine-3'-phosphate
  modified_base 17: mod_base = OTHER; note = 2'-O-methyluridine-3'-phosphate
  modified_base 18: mod_base = OTHER; note = 2'-O-methylguanosine-3'-phosphate
  modified_base 19: mod_base = OTHER; note = 2'-O-methyluridine-3'-phosphate
  modified_base 20: mod_base = OTHER; note = 2'-O-methylguanosine-3'-phosphate
  modified_base 21: mod_base = OTHER; note = 2'-O-methyladenosine-3'-phosphorothioate
  modified_base 22: mod_base = OTHER; note = 2'-O-methyladenosine-3'-phosphorothioate
  modified_base 23: mod_base = OTHER; note = 2'-O-methylcytidine-3'-phosphate
atgaaacgacttctcttgtgaac

SEQ ID NO: 282 - RNA, 23 nt, synthetic construct
  misc_feature 1..23: note = Description of Artificial Sequence: Synthetic oligonucleotide
  source 1..23: mol_type = other RNA
  modified_base 1: mod_base = OTHER; note = 2'-O-methyladenosine-3'-phosphorothioate
  modified_base 2: mod_base = OTHER; note = 2'-fluoroguanosine-3'-phosphorothioate
  modified_base 3: mod_base = OTHER; note = 2'-O-methyladenosine-3'-phosphate
  modified_base 4: mod_base = OTHER; note = 2'-O-methylcytidine-3'-phosphate
  modified_base 5: mod_base = OTHER; note = 2'-O-methyluridine-3'-phosphate
  modified_base 6: mod_base = OTHER; note = 2'-O-methyladenosine-3'-phosphate
  modified_base 7: mod_base = OTHER; note = Guanosine-glycol nucleic acid (GNA)
  modified_base 8: mod_base = OTHER; note = 2'-O-methyladenosine-3'-phosphate
  modified_base 9: mod_base = OTHER; note = 2'-O-methylcytidine-3'-phosphate
  modified_base 10: mod_base = OTHER; note = 2'-O-methyladenosine-3'-phosphate
  modified_base 11: mod_base = OTHER; note = 2'-O-methylcytidine-3'-phosphate
  modified_base 12: mod_base = OTHER; note = 2'-O-methyluridine-3'-phosphate
  modified_base 13: mod_base = OTHER; note = 2'-O-methyluridine-3'-phosphate
  modified_base 14: mod_base = OTHER; note = 2'-fluorouridine-3'-phosphate
  modified_base 15: mod_base = OTHER; note = 2'-O-methyluridine-3'-phosphate
  modified_base 16: mod_base = OTHER; note = 2'-fluorouridine-3'-phosphate
  modified_base 17: mod_base = OTHER; note = 2'-O-methylguanosine-3'-phosphate
  modified_base 18: mod_base = OTHER; note = 2'-O-methylguanosine-3'-phosphate
  modified_base 19: mod_base = OTHER; note = 2'-O-methylcytidine-3'-phosphate
  modified_base 20: mod_base = OTHER; note = 2'-O-methyluridine-3'-phosphate
  modified_base 21: mod_base = OTHER; note = 2'-O-methylcytidine-3'-phosphorothioate
  modified_base 22: mod_base = OTHER; note = 2'-O-methylcytidine-3'-phosphorothioate
  modified_base 23: mod_base = OTHER; note = 2'-O-methyluridine-3'-phosphate
agactagacactttttggctcct

SEQ ID NO: 283 - RNA, 23 nt, synthetic construct
  misc_feature 1..23: note = Description of Artificial Sequence: Synthetic oligonucleotide
  source 1..23: mol_type = other RNA
  modified_base 1: mod_base = OTHER; note = 2'-O-methyladenosine-3'-phosphorothioate
  modified_base 2: mod_base = OTHER; note = 2'-fluorocytidine-3'-phosphorothioate
  modified_base 3: mod_base = OTHER; note = 2'-O-methyladenosine-3'-phosphate
  modified_base 4: mod_base = OTHER; note = 2'-O-methyluridine-3'-phosphate
  modified_base 5: mod_base = OTHER; note = 2'-O-methylcytidine-3'-phosphate
  modified_base 6: mod_base = OTHER; note = 2'-O-methyladenosine-3'-phosphate
  modified_base 7: mod_base = OTHER; note = Cytidine-glycol nucleic acid (GNA)
  modified_base 8: mod_base = OTHER; note = 2'-O-methyluridine-3'-phosphate
  modified_base 9: mod_base = OTHER; note = 2'-O-methylcytidine-3'-phosphate
  modified_base 10: mod_base = OTHER; note = 2'-O-methyladenosine-3'-phosphate
  modified_base 11: mod_base = OTHER; note = 2'-O-methylcytidine-3'-phosphate
  modified_base 12: mod_base = OTHER; note = 2'-O-methyladenosine-3'-phosphate
  modified_base 13: mod_base = OTHER; note = 2'-O-methyluridine-3'-phosphate
  modified_base 14: mod_base = OTHER; note = 2'-fluorouridine-3'-phosphate
  modified_base 15: mod_base = OTHER; note = 2'-O-methylguanosine-3'-phosphate
  modified_base 16: mod_base = OTHER; note = 2'-fluorouridine-3'-phosphate
  modified_base 17: mod_base = OTHER; note = 2'-O-methyladenosine-3'-phosphate
  modified_base 18: mod_base = OTHER; note = 2'-O-methylguanosine-3'-phosphate
  modified_base 19: mod_base = OTHER; note = 2'-O-methyluridine-3'-phosphate
  modified_base 20: mod_base = OTHER; note = 2'-O-methyladenosine-3'-phosphate
  modified_base 21: mod_base = OTHER; note = 2'-O-methylguanosine-3'-phosphorothioate
  modified_base 22: mod_base = OTHER; note = 2'-O-methylguanosine-3'-phosphorothioate
  modified_base 23: mod_base = OTHER; note = 2'-O-methylguanosine-3'-phosphate
acatcactcacattgtagtaggg

SEQ ID NO: 284 - RNA, 23 nt, synthetic construct
  misc_feature 1..23: note = Description of Artificial Sequence: Synthetic oligonucleotide
  source 1..23: mol_type = other RNA
  modified_base 1: mod_base = OTHER; note = 2'-O-methyladenosine-3'-phosphorothioate
  modified_base 2: mod_base = OTHER; note = 2'-fluoroadenosine-3'-phosphorothioate
  modified_base 3: mod_base = OTHER; note = 2'-O-methyladenosine-3'-phosphate
  modified_base 4: mod_base = OTHER; note = 2'-O-methylcytidine-3'-phosphate
  modified_base 5: mod_base = OTHER; note = 2'-O-methyluridine-3'-phosphate
  modified_base 6: mod_base = OTHER; note = 2'-O-methyluridine-3'-phosphate
  modified_base 7: mod_base = OTHER; note = Guanosine-glycol nucleic acid (GNA)
  modified_base 8: mod_base = OTHER; note = 2'-O-methyladenosine-3'-phosphate
  modified_base 9: mod_base = OTHER; note = 2'-O-methyladenosine-3'-phosphate
  modified_base 10: mod_base = OTHER; note = 2'-O-methyluridine-3'-phosphate
  modified_base 11: mod_base = OTHER; note = 2'-O-methylguanosine-3'-phosphate
  modified_base 12: mod_base = OTHER; note = 2'-O-methyladenosine-3'-phosphate
  modified_base 13: mod_base = OTHER; note = 2'-O-methyladenosine-3'-phosphate
  modified_base 14: mod_base = OTHER; note = 2'-fluoroadenosine-3'-phosphate
  modified_base 15: mod_base = OTHER; note = 2'-O-methylcytidine-3'-phosphate
  modified_base 16: mod_base = OTHER; note = 2'-fluoroguanosine-3'-phosphate
  modified_base 17: mod_base = OTHER; note = 2'-O-methyladenosine-3'-phosphate
  modified_base 18: mod_base = OTHER; note = 2'-O-methylcytidine-3'-phosphate
  modified_base 19: mod_base = OTHER; note = 2'-O-methyluridine-3'-phosphate
  modified_base 20: mod_base = OTHER; note = 2'-O-methyluridine-3'-phosphate
  modified_base 21: mod_base = OTHER; note = 2'-O-methylcytidine-3'-phosphorothioate
  modified_base 22: mod_base = OTHER; note = 2'-O-methyluridine-3'-phosphorothioate
  modified_base 23: mod_base = OTHER; note = 2'-O-methylcytidine-3'-phosphate
aaacttgaatgaaacgacttctc

SEQ ID NO: 285 - RNA, 23 nt, synthetic construct
  misc_feature 1..23: note = Description of Artificial Sequence: Synthetic oligonucleotide
  source 1..23: mol_type = other RNA
  modified_base 1: mod_base = OTHER; note = 2'-O-methyladenosine-3'-phosphorothioate
  modified_base 2: mod_base = OTHER; note = 2'-fluoroadenosine-3'-phosphorothioate
  modified_base 3: mod_base = OTHER; note = 2'-O-methyladenosine-3'-phosphate
  modified_base 4: mod_base = OTHER; note = 2'-O-methylcytidine-3'-phosphate
  modified_base 5: mod_base = OTHER; note = 2'-O-methylguanosine-3'-phosphate
  modified_base 6: mod_base = OTHER; note = 2'-O-methyladenosine-3'-phosphate
  modified_base 7: mod_base = OTHER; note = Cytidine-glycol nucleic acid (GNA)
  modified_base 8: mod_base = OTHER; note = 2'-O-methyluridine-3'-phosphate
  modified_base 9: mod_base = OTHER; note = 2'-O-methyluridine-3'-phosphate
  modified_base 10: mod_base = OTHER; note = 2'-O-methylcytidine-3'-phosphate
  modified_base 11: mod_base = OTHER; note = 2'-O-methyluridine-3'-phosphate
  modified_base 12: mod_base = OTHER; note = 2'-O-methylcytidine-3'-phosphate
  modified_base 13: mod_base = OTHER; note = 2'-O-methyluridine-3'-phosphate
  modified_base 14: mod_base = OTHER; note = 2'-fluorouridine-3'-phosphate
  modified_base 15: mod_base = OTHER; note = 2'-O-methylguanosine-3'-phosphate
  modified_base 16: mod_base = OTHER; note = 2'-fluorouridine-3'-phosphate
  modified_base 17: mod_base = OTHER; note = 2'-O-methylguanosine-3'-phosphate
  modified_base 18: mod_base = OTHER; note = 2'-O-methyladenosine-3'-phosphate
  modified_base 19: mod_base = OTHER; note = 2'-O-methyladenosine-3'-phosphate
  modified_base 20: mod_base = OTHER; note = 2'-O-methylcytidine-3'-phosphate
  modified_base 21: mod_base = OTHER; note = 2'-O-methyluridine-3'-phosphorothioate
  modified_base 22: mod_base = OTHER; note = 2'-O-methyladenosine-3'-phosphorothioate
  modified_base 23: mod_base = OTHER; note = 2'-O-methyluridine-3'-phosphate
aaacgacttctcttgtgaactat

SEQ ID NO: 286 - DNA, 23 bp, synthetic construct
  misc_feature 1..23: note = Description of Artificial Sequence: Synthetic oligonucleotide
  source 1..23: mol_type = other DNA
  modified_base 1: mod_base = OTHER; note = 2'-O-methyladenosine-3'-phosphorothioate
  modified_base 2: mod_base = OTHER; note = 2'-fluoroadenosine-3'-phosphorothioate
  modified_base 3: mod_base = OTHER; note = 2'-O-methyladenosine-3'-phosphate
  modified_base 4: mod_base = OTHER; note = 2'-O-methylguanosine-3'-phosphate
  modified_base 5: mod_base = OTHER; note = 2'-O-methylcytidine-3'-phosphate
  modified_base 6: mod_base = OTHER; note = 2'-O-methylcytidine-3'-phosphate
  modified_base 7: mod_base = OTHER; note = Thymidine-glycol nucleic acid (GNA) S-Isomer
  modified_base 8: mod_base = OTHER; note = 2'-O-methylcytidine-3'-phosphate
  modified_base 9: mod_base = OTHER; note = 2'-O-methyladenosine-3'-phosphate
  modified_base 10: mod_base = OTHER; note = 2'-O-methyladenosine-3'-phosphate
  modified_base 11: mod_base = OTHER; note = 2'-O-methyladenosine-3'-phosphate
  modified_base 12: mod_base = OTHER; note = 2'-O-methylguanosine-3'-phosphate
  modified_base 13: mod_base = OTHER; note = 2'-O-methylcytidine-3'-phosphate
  modified_base 14: mod_base = OTHER; note = 2'-fluorouridine-3'-phosphate
  modified_base 15: mod_base = OTHER; note = 2'-O-methylcytidine-3'-phosphate
  modified_base 16: mod_base = OTHER; note = 2'-fluoroguanosine-3'-phosphate
  modified_base 17: mod_base = OTHER; note = 2'-O-methyladenosine-3'-phosphate
  modified_base 18: mod_base = OTHER; note = 2'-O-methylguanosine-3'-phosphate
  modified_base 19: mod_base = OTHER; note = 2'-O-methyluridine-3'-phosphate
  modified_base 20: mod_base = OTHER; note = 2'-O-methyluridine-3'-phosphate
  modified_base 21: mod_base = OTHER; note = 2'-O-methylguanosine-3'-phosphorothioate
  modified_base 22: mod_base = OTHER; note = 2'-O-methyluridine-3'-phosphorothioate
  modified_base 23: mod_base = OTHER; note = 2'-O-methyluridine-3'-phosphate
  misc_feature 1..6: note = RNA
  misc_feature 7: note = DNA
  misc_feature 8..23: note = RNA
aaagcctcaaagctcgagttgtt

SEQ ID NO: 287 - RNA, 23 nt, synthetic construct
  misc_feature 1..23: note = Description of Artificial Sequence: Synthetic oligonucleotide
  source 1..23: mol_type = other RNA
  modified_base 1: mod_base = OTHER; note = 2'-O-methyladenosine-3'-phosphorothioate
  modified_base 2: mod_base = OTHER; note = 2'-fluorouridine -3'-phosphorothioate
  modified_base 3: mod_base = OTHER; note = 2'-O-methyluridine-3'-phosphate
  modified_base 4: mod_base = OTHER; note = 2'-O-methyluridine-3'-phosphate
  modified_base 5: mod_base = OTHER; note = 2'-O-methyluridine-3'-phosphate
  modified_base 6: mod_base = OTHER; note = 2'-O-methyluridine-3'-phosphate
  modified_base 7: mod_base = OTHER; note = Guanosine-glycol nucleic acid (GNA)
  modified_base 8: mod_base = OTHER; note = 2'-O-methylcytidine-3'-phosphate
  modified_base 9: mod_base = OTHER; note = 2'-O-methyladenosine-3'-phosphate
  modified_base 10: mod_base = OTHER; note = 2'-O-methylguanosine-3'-phosphate
  modified_base 11: mod_base = OTHER; note = 2'-O-methyladenosine-3'-phosphate
  modified_base 12: mod_base = OTHER; note = 2'-O-methylcytidine-3'-phosphate
  modified_base 13: mod_base = OTHER; note = 2'-O-methyladenosine-3'-phosphate
  modified_base 14: mod_base = OTHER; note = 2'-fluorouridine-3'-phosphate
  modified_base 15: mod_base = OTHER; note = 2'-O-methylcytidine-3'-phosphate
  modified_base 16: mod_base = OTHER; note = 2'-fluorocytidine-3'-phosphate
  modified_base 17: mod_base = OTHER; note = 2'-O-methyladenosine-3'-phosphate
  modified_base 18: mod_base = OTHER; note = 2'-O-methylcytidine-3'-phosphate
  modified_base 19: mod_base = OTHER; note = 2'-O-methyluridine-3'-phosphate
  modified_base 20: mod_base = OTHER; note = 2'-O-methyladenosine-3'-phosphate
  modified_base 21: mod_base = OTHER; note = 2'-O-methylcytidine-3'-phosphorothioate
  modified_base 22: mod_base = OTHER; note = 2'-O-methyluridine-3'-phosphorothioate
  modified_base 23: mod_base = OTHER; note = 2'-O-methylcytidine-3'-phosphate
atttttgcagacatccactactc

SEQ ID NO: 288 - RNA, 23 nt, synthetic construct
  misc_feature 1..23: note = Description of Artificial Sequence: Synthetic oligonucleotide
  source 1..23: mol_type = other RNA
  modified_base 1: mod_base = OTHER; note = 2'-O-methyladenosine-3'-phosphorothioate
  modified_base 2: mod_base = OTHER; note = 2'-fluorouridine -3'-phosphorothioate
  modified_base 3: mod_base = OTHER; note = 2'-O-methyladenosine-3'-phosphate
  modified_base 4: mod_base = OTHER; note = 2'-O-methylguanosine-3'-phosphate
  modified_base 5: mod_base = OTHER; note = 2'-O-methyladenosine-3'-phosphate
  modified_base 6: mod_base = OTHER; note = 2'-O-methylcytidine-3'-phosphate
  modified_base 7: mod_base = OTHER; note = Adenosine-glycol nucleic acid (GNA)
  modified_base 8: mod_base = OTHER; note = 2'-O-methyluridine-3'-phosphate
  modified_base 9: mod_base = OTHER; note = 2'-O-methylcytidine-3'-phosphate
  modified_base 10: mod_base = OTHER; note = 2'-O-methylcytidine-3'-phosphate
  modified_base 11: mod_base = OTHER; note = 2'-O-methyladenosine-3'-phosphate
  modified_base 12: mod_base = OTHER; note = 2'-O-methylguanosine-3'-phosphate
  modified_base 13: mod_base = OTHER; note = 2'-O-methyladenosine-3'-phosphate
  modified_base 14: mod_base = OTHER; note = 2'-fluorouridine-3'-phosphate
  modified_base 15: mod_base = OTHER; note = 2'-O-methyladenosine-3'-phosphate
  modified_base 16: mod_base = OTHER; note = 2'-fluoroadenosine-3'-phosphate
  modified_base 17: mod_base = OTHER; note = 2'-O-methyluridine-3'-phosphate
  modified_base 18: mod_base = OTHER; note = 2'-O-methylcytidine-3'-phosphate
  modified_base 19: mod_base = OTHER; note = 2'-O-methylcytidine-3'-phosphate
  modified_base 20: mod_base = OTHER; note = 2'-O-methyluridine-3'-phosphate
  modified_base 21: mod_base = OTHER; note = 2'-O-methylcytidine-3'-phosphorothioate
  modified_base 22: mod_base = OTHER; note = 2'-O-methylcytidine-3'-phosphorothioate
  modified_base 23: mod_base = OTHER; note = 2'-O-methylcytidine-3'-phosphate
atagacatccagataatcctccc

SEQ ID NO: 289 - DNA, 23 bp, synthetic construct
  misc_feature 1..23: note = Description of Artificial Sequence: Synthetic oligonucleotide
  source 1..23: mol_type = other DNA
  modified_base 1: mod_base = OTHER; note = 2'-O-methyladenosine-3'-phosphorothioate
  modified_base 2: mod_base = OTHER; note = 2'-fluorouridine -3'-phosphorothioate
  modified_base 3: mod_base = OTHER; note = 2'-O-methylguanosine-3'-phosphate
  modified_base 4: mod_base = OTHER; note = 2'-O-methyluridine-3'-phosphate
  modified_base 5: mod_base = OTHER; note = 2'-O-methylcytidine-3'-phosphate
  modified_base 6: mod_base = OTHER; note = 2'-O-methylguanosine-3'-phosphate
  modified_base 7: mod_base = OTHER; note = Thymidine-glycol nucleic acid (GNA) S-Isomer
  modified_base 8: mod_base = OTHER; note = 2'-O-methyladenosine-3'-phosphate
  modified_base 9: mod_base = OTHER; note = 2'-O-methylcytidine-3'-phosphate
  modified_base 10: mod_base = OTHER; note = 2'-O-methyladenosine-3'-phosphate
  modified_base 11: mod_base = OTHER; note = 2'-O-methyluridine-3'-phosphate
  modified_base 12: mod_base = OTHER; note = 2'-O-methylguanosine-3'-phosphate
  modified_base 13: mod_base = OTHER; note = 2'-O-methyladenosine-3'-phosphate
  modified_base 14: mod_base = OTHER; note = 2'-fluoroadenosine-3'-phosphate
  modified_base 15: mod_base = OTHER; note = 2'-O-methylguanosine-3'-phosphate
  modified_base 16: mod_base = OTHER; note = 2'-fluoroguanosine-3'-phosphate
  modified_base 17: mod_base = OTHER; note = 2'-O-methyladenosine-3'-phosphate
  modified_base 18: mod_base = OTHER; note = 2'-O-methylguanosine-3'-phosphate
  modified_base 19: mod_base = OTHER; note = 2'-O-methyluridine-3'-phosphate
  modified_base 20: mod_base = OTHER; note = 2'-O-methylcytidine-3'-phosphate
  modified_base 21: mod_base = OTHER; note = 2'-O-methyluridine-3'-phosphorothioate
  modified_base 22: mod_base = OTHER; note = 2'-O-methyluridine-3'-phosphorothioate
  modified_base 23: mod_base = OTHER; note = 2'-O-methylguanosine-3'-phosphate
  misc_feature 1..6: note = RNA
  misc_feature 7: note = DNA
  misc_feature 8..23: note = RNA
atgtcgtacatgaaggagtcttg

SEQ ID NO: 290 - RNA, 23 nt, synthetic construct
  misc_feature 1..23: note = Description of Artificial Sequence: Synthetic oligonucleotide
  source 1..23: mol_type = other RNA
  modified_base 1: mod_base = OTHER; note = 2'-O-methyladenosine-3'-phosphorothioate
  modified_base 2: mod_base = OTHER; note = 2'-fluoroadenosine-3'-phosphorothioate
  modified_base 3: mod_base = OTHER; note = 2'-O-methyluridine-3'-phosphate
  modified_base 4: mod_base = OTHER; note = 2'-O-methylguanosine-3'-phosphate
  modified_base 5: mod_base = OTHER; note = 2'-O-methyladenosine-3'-phosphate
  modified_base 6: mod_base = OTHER; note = 2'-O-methyladenosine-3'-phosphate
  modified_base 7: mod_base = OTHER; note = Adenosine-glycol nucleic acid (GNA)
  modified_base 8: mod_base = OTHER; note = 2'-O-methylcytidine-3'-phosphate
  modified_base 9: mod_base = OTHER; note = 2'-O-methylguanosine-3'-phosphate
  modified_base 10: mod_base = OTHER; note = 2'-O-methyladenosine-3'-phosphate
  modified_base 11: mod_base = OTHER; note = 2'-O-methylcytidine-3'-phosphate
  modified_base 12: mod_base = OTHER; note = 2'-O-methyluridine-3'-phosphate
  modified_base 13: mod_base = OTHER; note = 2'-O-methyluridine-3'-phosphate
  modified_base 14: mod_base = OTHER; note = 2'-fluorocytidine-3'-phosphate
  modified_base 15: mod_base = OTHER; note = 2'-O-methyluridine-3'-phosphate
  modified_base 16: mod_base = OTHER; note = 2'-fluorocytidine-3'-phosphate
  modified_base 17: mod_base = OTHER; note = 2'-O-methyluridine-3'-phosphate
  modified_base 18: mod_base = OTHER; note = 2'-O-methyluridine-3'-phosphate
  modified_base 19: mod_base = OTHER; note = 2'-O-methylguanosine-3'-phosphate
  modified_base 20: mod_base = OTHER; note = 2'-O-methyluridine-3'-phosphate
  modified_base 21: mod_base = OTHER; note = 2'-O-methylguanosine-3'-phosphorothioate
  modified_base 22: mod_base = OTHER; note = 2'-O-methyladenosine-3'-phosphorothioate
  modified_base 23: mod_base = OTHER; note = 2'-O-methyladenosine-3'-phosphate
aatgaaacgacttctcttgtgaa

SEQ ID NO: 291 - DNA, 23 bp, synthetic construct
  misc_feature 1..23: note = Description of Artificial Sequence: Synthetic oligonucleotide
  source 1..23: mol_type = other DNA
  modified_base 1: mod_base = OTHER; note = 2'-O-methyladenosine-3'-phosphorothioate
  modified_base 2: mod_base = OTHER; note = 2'-fluorocytidine-3'-phosphorothioate
  modified_base 3: mod_base = OTHER; note = 2'-O-methylguanosine-3'-phosphate
  modified_base 4: mod_base = OTHER; note = 2'-O-methyladenosine-3'-phosphate
  modified_base 5: mod_base = OTHER; note = 2'-O-methylcytidine-3'-phosphate
  modified_base 6: mod_base = OTHER; note = 2'-O-methyluridine-3'-phosphate
  modified_base 7: mod_base = OTHER; note = Thymidine-glycol nucleic acid (GNA) S-Isomer
  modified_base 8: mod_base = OTHER; note = 2'-O-methylcytidine-3'-phosphate
  modified_base 9: mod_base = OTHER; note = 2'-O-methyluridine-3'-phosphate
  modified_base 10: mod_base = OTHER; note = 2'-O-methylcytidine-3'-phosphate
  modified_base 11: mod_base = OTHER; note = 2'-O-methyluridine-3'-phosphate
  modified_base 12: mod_base = OTHER; note = 2'-O-methyluridine-3'-phosphate
  modified_base 13: mod_base = OTHER; note = 2'-O-methylguanosine-3'-phosphate
  modified_base 14: mod_base = OTHER; note = 2'-fluorouridine-3'-phosphate
  modified_base 15: mod_base = OTHER; note = 2'-O-methylguanosine-3'-phosphate
  modified_base 16: mod_base = OTHER; note = 2'-fluoroadenosine-3'-phosphate
  modified_base 17: mod_base = OTHER; note = 2'-O-methyladenosine-3'-phosphate
  modified_base 18: mod_base = OTHER; note = 2'-O-methylcytidine-3'-phosphate
  modified_base 19: mod_base = OTHER; note = 2'-O-methyluridine-3'-phosphate
  modified_base 20: mod_base = OTHER; note = 2'-O-methyladenosine-3'-phosphate
  modified_base 21: mod_base = OTHER; note = 2'-O-methyluridine-3'-phosphorothioate
  modified_base 22: mod_base = OTHER; note = 2'-O-methylcytidine-3'-phosphorothioate
  modified_base 23: mod_base = OTHER; note = 2'-O-methyladenosine-3'-phosphate
  misc_feature 1..6: note = RNA
  misc_feature 7: note = DNA
  misc_feature 8..23: note = RNA
acgacttctcttgtgaactatca

SEQ ID NO: 292 - RNA, 23 nt, synthetic construct
  misc_feature 1..23: note = Description of Artificial Sequence: Synthetic oligonucleotide
  source 1..23: mol_type = other RNA
  modified_base 1: mod_base = OTHER; note = 2'-O-methyladenosine-3'-phosphorothioate
  modified_base 2: mod_base = OTHER; note = 2'-fluorouridine -3'-phosphorothioate
  modified_base 3: mod_base = OTHER; note = 2'-O-methylguanosine-3'-phosphate
  modified_base 4: mod_base = OTHER; note = 2'-O-methyladenosine-3'-phosphate
  modified_base 5: mod_base = OTHER; note = 2'-O-methylcytidine-3'-phosphate
  modified_base 6: mod_base = OTHER; note = 2'-O-methyluridine-3'-phosphate
  modified_base 7: mod_base = OTHER; note = Adenosine-glycol nucleic acid (GNA)
  modified_base 8: mod_base = OTHER; note = 2'-O-methylguanosine-3'-phosphate
  modified_base 9: mod_base = OTHER; note = 2'-O-methyladenosine-3'-phosphate
  modified_base 10: mod_base = OTHER; note = 2'-O-methylcytidine-3'-phosphate
  modified_base 11: mod_base = OTHER; note = 2'-O-methyladenosine-3'-phosphate
  modified_base 12: mod_base = OTHER; note = 2'-O-methylcytidine-3'-phosphate
  modified_base 13: mod_base = OTHER; note = 2'-O-methyluridine-3'-phosphate
  modified_base 14: mod_base = OTHER; note = 2'-fluorouridine-3'-phosphate
  modified_base 15: mod_base = OTHER; note = 2'-O-methyluridine-3'-phosphate
  modified_base 16: mod_base = OTHER; note = 2'-fluorouridine-3'-phosphate
  modified_base 17: mod_base = OTHER; note = 2'-O-methyluridine-3'-phosphate
  modified_base 18: mod_base = OTHER; note = 2'-O-methylguanosine-3'-phosphate
  modified_base 19: mod_base = OTHER; note = 2'-O-methylguanosine-3'-phosphate
  modified_base 20: mod_base = OTHER; note = 2'-O-methylcytidine-3'-phosphate
  modified_base 21: mod_base = OTHER; note = 2'-O-methyluridine-3'-phosphorothioate
  modified_base 22: mod_base = OTHER; note = 2'-O-methylcytidine-3'-phosphorothioate
  modified_base 23: mod_base = OTHER; note = 2'-O-methylcytidine-3'-phosphate
atgactagacactttttggctcc

SEQ ID NO: 293 - RNA, 23 nt, synthetic construct
  misc_feature 1..23: note = Description of Artificial Sequence: Synthetic oligonucleotide
  source 1..23: mol_type = other RNA
  modified_base 1: mod_base = OTHER; note = 2'-O-methyladenosine-3'-phosphorothioate
  modified_base 2: mod_base = OTHER; note = 2'-fluoroguanosine-3'-phosphorothioate
  modified_base 3: mod_base = OTHER; note = 2'-O-methyluridine-3'-phosphate
  modified_base 4: mod_base = OTHER; note = 2'-O-methylcytidine-3'-phosphate
  modified_base 5: mod_base = OTHER; note = 2'-O-methylguanosine-3'-phosphate
  modified_base 6: mod_base = OTHER; note = 2'-O-methylcytidine-3'-phosphate
  modified_base 7: mod_base = OTHER; note = Adenosine-glycol nucleic acid (GNA)
  modified_base 8: mod_base = OTHER; note = 2'-O-methylguanosine-3'-phosphate
  modified_base 9: mod_base = OTHER; note = 2'-O-methylcytidine-3'-phosphate
  modified_base 10: mod_base = OTHER; note = 2'-O-methyluridine-3'-phosphate
  modified_base 11: mod_base = OTHER; note = 2'-O-methylguanosine-3'-phosphate
  modified_base 12: mod_base = OTHER; note = 2'-O-methyluridine-3'-phosphate
  modified_base 13: mod_base = OTHER; note = 2'-O-methyluridine-3'-phosphate
  modified_base 14: mod_base = OTHER; note = 2'-fluorouridine-3'-phosphate
  modified_base 15: mod_base = OTHER; note = 2'-O-methyluridine-3'-phosphate
  modified_base 16: mod_base = OTHER; note = 2'-fluoroadenosine-3'-phosphate
  modified_base 17: mod_base = OTHER; note = 2'-O-methyladenosine-3'-phosphate
  modified_base 18: mod_base = OTHER; note = 2'-O-methyluridine-3'-phosphate
  modified_base 19: mod_base = OTHER; note = 2'-O-methyluridine-3'-phosphate
  modified_base 20: mod_base = OTHER; note = 2'-O-methylcytidine-3'-phosphate
  modified_base 21: mod_base = OTHER; note = 2'-O-methyladenosine-3'-phosphorothioate
  modified_base 22: mod_base = OTHER; note = 2'-O-methyladenosine-3'-phosphorothioate
  modified_base 23: mod_base = OTHER; note = 2'-O-methyluridine-3'-phosphate
agtcgcagctgttttaattcaat

SEQ ID NO: 294 - RNA, 23 nt, synthetic construct
  misc_feature 1..23: note = Description of Artificial Sequence: Synthetic oligonucleotide
  source 1..23: mol_type = other RNA
  modified_base 1: mod_base = OTHER; note = 2'-O-methyladenosine-3'-phosphorothioate
  modified_base 2: mod_base = OTHER; note = 2'-fluorocytidine-3'-phosphorothioate
  modified_base 3: mod_base = OTHER; note = 2'-O-methyladenosine-3'-phosphate
  modified_base 4: mod_base = OTHER; note = 2'-O-methyladenosine-3'-phosphate
  modified_base 5: mod_base = OTHER; note = 2'-O-methyladenosine-3'-phosphate
  modified_base 6: mod_base = OTHER; note = 2'-O-methylguanosine-3'-phosphate
  modified_base 7: mod_base = OTHER; note = Cytidine-glycol nucleic acid (GNA)
  modified_base 8: mod_base = OTHER; note = 2'-O-methyluridine-3'-phosphate
  modified_base 9: mod_base = OTHER; note = 2'-O-methylcytidine-3'-phosphate
  modified_base 10: mod_base = OTHER; note = 2'-O-methylguanosine-3'-phosphate
  modified_base 11: mod_base = OTHER; note = 2'-O-methyladenosine-3'-phosphate
  modified_base 12: mod_base = OTHER; note = 2'-O-methylguanosine-3'-phosphate
  modified_base 13: mod_base = OTHER; note = 2'-O-methyluridine-3'-phosphate
  modified_base 14: mod_base = OTHER; note = 2'-fluorouridine-3'-phosphate
  modified_base 15: mod_base = OTHER; note = 2'-O-methylguanosine-3'-phosphate
  modified_base 16: mod_base = OTHER; note = 2'-fluorouridine-3'-phosphate
  modified_base 17: mod_base = OTHER; note = 2'-O-methyluridine-3'-phosphate
  modified_base 18: mod_base = OTHER; note = 2'-O-methylcytidine-3'-phosphate
  modified_base 19: mod_base = OTHER; note = 2'-O-methylcytidine-3'-phosphate
  modified_base 20: mod_base = OTHER; note = 2'-O-methylcytidine-3'-phosphate
  modified_base 21: mod_base = OTHER; note = 2'-O-methyluridine-3'-phosphorothioate
  modified_base 22: mod_base = OTHER; note = 2'-O-methylcytidine-3'-phosphorothioate
  modified_base 23: mod_base = OTHER; note = 2'-O-methylguanosine-3'-phosphate
acaaagctcgagttgttccctcg

SEQ ID NO: 295 - RNA, 23 nt, synthetic construct
  misc_feature 1..23: note = Description of Artificial Sequence: Synthetic oligonucleotide
  source 1..23: mol_type = other RNA
  modified_base 1: mod_base = OTHER; note = 2'-O-methyladenosine-3'-phosphorothioate
  modified_base 2: mod_base = OTHER; note = 2'-fluoroguanosine-3'-phosphorothioate
  modified_base 3: mod_base = OTHER; note = 2'-O-methyladenosine-3'-phosphate
  modified_base 4: mod_base = OTHER; note = 2'-O-methylguanosine-3'-phosphate
  modified_base 5: mod_base = OTHER; note = 2'-O-methyladenosine-3'-phosphate
  modified_base 6: mod_base = OTHER; note = 2'-O-methyluridine-3'-phosphate
  modified_base 7: mod_base = OTHER; note = Guanosine-glycol nucleic acid (GNA)
  modified_base 8: mod_base = OTHER; note = 2'-O-methyluridine-3'-phosphate
  modified_base 9: mod_base = OTHER; note = 2'-O-methylcytidine-3'-phosphate
  modified_base 10: mod_base = OTHER; note = 2'-O-methylcytidine-3'-phosphate
  modified_base 11: mod_base = OTHER; note = 2'-O-methyluridine-3'-phosphate
  modified_base 12: mod_base = OTHER; note = 2'-O-methyluridine-3'-phosphate
  modified_base 13: mod_base = OTHER; note = 2'-O-methylguanosine-3'-phosphate
  modified_base 14: mod_base = OTHER; note = 2'-fluoroadenosine-3'-phosphate
  modified_base 15: mod_base = OTHER; note = 2'-O-methylcytidine-3'-phosphate
  modified_base 16: mod_base = OTHER; note = 2'-fluorouridine-3'-phosphate
  modified_base 17: mod_base = OTHER; note = 2'-O-methyluridine-3'-phosphate
  modified_base 18: mod_base = OTHER; note = 2'-O-methyluridine-3'-phosphate
  modified_base 19: mod_base = OTHER; note = 2'-O-methylguanosine-3'-phosphate
  modified_base 20: mod_base = OTHER; note = 2'-O-methyluridine-3'-phosphate
  modified_base 21: mod_base = OTHER; note = 2'-O-methylcytidine-3'-phosphorothioate
  modified_base 22: mod_base = OTHER; note = 2'-O-methyladenosine-3'-phosphorothioate
  modified_base 23: mod_base = OTHER; note = 2'-O-methyluridine-3'-phosphate
agagatgtccttgactttgtcat

SEQ ID NO: 296 - DNA, 23 bp, synthetic construct
  misc_feature 1..23: note = Description of Artificial Sequence: Synthetic oligonucleotide
  source 1..23: mol_type = other DNA
  modified_base 1: mod_base = OTHER; note = 2'-O-methyladenosine-3'-phosphorothioate
  modified_base 2: mod_base = OTHER; note = 2'-fluoroadenosine-3'-phosphorothioate
  modified_base 3: mod_base = OTHER; note = 2'-O-methylcytidine-3'-phosphate
  modified_base 4: mod_base = OTHER; note = 2'-O-methyluridine-3'-phosphate
  modified_base 5: mod_base = OTHER; note = 2'-O-methyluridine-3'-phosphate
  modified_base 6: mod_base = OTHER; note = 2'-O-methylcytidine-3'-phosphate
  modified_base 7: mod_base = OTHER; note = Thymidine-glycol nucleic acid (GNA) S-Isomer
  modified_base 8: mod_base = OTHER; note = 2'-O-methylcytidine-3'-phosphate
  modified_base 9: mod_base = OTHER; note = 2'-O-methyluridine-3'-phosphate
  modified_base 10: mod_base = OTHER; note = 2'-O-methyluridine-3'-phosphate
  modified_base 11: mod_base = OTHER; note = 2'-O-methylguanosine-3'-phosphate
  modified_base 12: mod_base = OTHER; note = 2'-O-methyluridine-3'-phosphate
  modified_base 13: mod_base = OTHER; note = 2'-O-methylguanosine-3'-phosphate
  modified_base 14: mod_base = OTHER; note = 2'-fluoroadenosine-3'-phosphate
  modified_base 15: mod_base = OTHER; note = 2'-O-methyladenosine-3'-phosphate
  modified_base 16: mod_base = OTHER; note = 2'-fluorocytidine-3'-phosphate
  modified_base 17: mod_base = OTHER; note = 2'-O-methyluridine-3'-phosphate
  modified_base 18: mod_base = OTHER; note = 2'-O-methyladenosine-3'-phosphate
  modified_base 19: mod_base = OTHER; note = 2'-O-methyluridine-3'-phosphate
  modified_base 20: mod_base = OTHER; note = 2'-O-methylcytidine-3'-phosphate
  modified_base 21: mod_base = OTHER; note = 2'-O-methyladenosine-3'-phosphorothioate
  modified_base 22: mod_base = OTHER; note = 2'-O-methyladenosine-3'-phosphorothioate
  modified_base 23: mod_base = OTHER; note = 2'-O-methylguanosine-3'-phosphate
  misc_feature 1..6: note = RNA
  misc_feature 7: note = DNA
  misc_feature 8..23: note = RNA
aacttctcttgtgaactatcaag

SEQ ID NO: 297 - DNA, 23 bp, synthetic construct
  misc_feature 1..23: note = Description of Artificial Sequence: Synthetic oligonucleotide
  source 1..23: mol_type = other DNA
  modified_base 1: mod_base = OTHER; note = 2'-O-methyladenosine-3'-phosphorothioate
  modified_base 2: mod_base = OTHER; note = 2'-fluorouridine -3'-phosphorothioate
  modified_base 3: mod_base = OTHER; note = 2'-O-methylcytidine-3'-phosphate
  modified_base 4: mod_base = OTHER; note = 2'-O-methyladenosine-3'-phosphate
  modified_base 5: mod_base = OTHER; note = 2'-O-methyladenosine-3'-phosphate
  modified_base 6: mod_base = OTHER; note = 2'-O-methyluridine-3'-phosphate
  modified_base 7: mod_base = OTHER; note = Thymidine-glycol nucleic acid (GNA) S-Isomer
  modified_base 8: mod_base = OTHER; note = 2'-O-methyladenosine-3'-phosphate
  modified_base 9: mod_base = OTHER; note = 2'-O-methyladenosine-3'-phosphate
  modified_base 10: mod_base = OTHER; note = 2'-O-methylguanosine-3'-phosphate
  modified_base 11: mod_base = OTHER; note = 2'-O-methyluridine-3'-phosphate
  modified_base 12: mod_base = OTHER; note = 2'-O-methyluridine-3'-phosphate
  modified_base 13: mod_base = OTHER; note = 2'-O-methylguanosine-3'-phosphate
  modified_base 14: mod_base = OTHER; note = 2'-fluoroadenosine-3'-phosphate
  modified_base 15: mod_base = OTHER; note = 2'-O-methylcytidine-3'-phosphate
  modified_base 16: mod_base = OTHER; note = 2'-fluorouridine-3'-phosphate
  modified_base 17: mod_base = OTHER; note = 2'-O-methyladenosine-3'-phosphate
  modified_base 18: mod_base = OTHER; note = 2'-O-methylguanosine-3'-phosphate
  modified_base 19: mod_base = OTHER; note = 2'-O-methyladenosine-3'-phosphate
  modified_base 20: mod_base = OTHER; note = 2'-O-methylcytidine-3'-phosphate
  modified_base 21: mod_base = OTHER; note = 2'-O-methyladenosine-3'-phosphorothioate
  modified_base 22: mod_base = OTHER; note = 2'-O-methylcytidine-3'-phosphorothioate
  modified_base 23: mod_base = OTHER; note = 2'-O-methyluridine-3'-phosphate
  misc_feature 1..6: note = RNA
  misc_feature 7: note = DNA
  misc_feature 8..23: note = RNA
atcaattaagttgactagacact

SEQ ID NO: 298 - RNA, 23 nt, synthetic construct
  misc_feature 1..23: note = Description of Artificial Sequence: Synthetic oligonucleotide
  source 1..23: mol_type = other RNA
  modified_base 1: mod_base = OTHER; note = 2'-O-methyladenosine-3'-phosphorothioate
  modified_base 2: mod_base = OTHER; note = 2'-fluoroadenosine-3'-phosphorothioate
  modified_base 3: mod_base = OTHER; note = 2'-O-methyladenosine-3'-phosphate
  modified_base 4: mod_base = OTHER; note = 2'-O-methyladenosine-3'-phosphate
  modified_base 5: mod_base = OTHER; note = 2'-O-methylcytidine-3'-phosphate
  modified_base 6: mod_base = OTHER; note = 2'-O-methylguanosine-3'-phosphate
  modified_base 7: mod_base = OTHER; note = Adenosine-glycol nucleic acid (GNA)
  modified_base 8: mod_base = OTHER; note = 2'-O-methylcytidine-3'-phosphate
  modified_base 9: mod_base = OTHER; note = 2'-O-methyluridine-3'-phosphate
  modified_base 10: mod_base = OTHER; note = 2'-O-methyluridine-3'-phosphate
  modified_base 11: mod_base = OTHER; note = 2'-O-methylcytidine-3'-phosphate
  modified_base 12: mod_base = OTHER; note = 2'-O-methyluridine-3'-phosphate
  modified_base 13: mod_base = OTHER; note = 2'-O-methylcytidine-3'-phosphate
  modified_base 14: mod_base = OTHER; note = 2'-fluorouridine-3'-phosphate
  modified_base 15: mod_base = OTHER; note = 2'-O-methyluridine-3'-phosphate
  modified_base 16: mod_base = OTHER; note = 2'-fluoroguanosine-3'-phosphate
  modified_base 17: mod_base = OTHER; note = 2'-O-methyluridine-3'-phosphate
  modified_base 18: mod_base = OTHER; note = 2'-O-methylguanosine-3'-phosphate
  modified_base 19: mod_base = OTHER; note = 2'-O-methyladenosine-3'-phosphate
  modified_base 20: mod_base = OTHER; note = 2'-O-methyladenosine-3'-phosphate
  modified_base 21: mod_base = OTHER; note = 2'-O-methylcytidine-3'-phosphorothioate
  modified_base 22: mod_base = OTHER; note = 2'-O-methyluridine-3'-phosphorothioate
  modified_base 23: mod_base = OTHER; note = 2'-O-methyladenosine-3'-phosphate
aaaacgacttctcttgtgaacta

SEQ ID NO: 299 - RNA, 23 nt, synthetic construct
  misc_feature 1..23: note = Description of Artificial Sequence: Synthetic oligonucleotide
  source 1..23: mol_type = other RNA
  modified_base 1: mod_base = OTHER; note = 2'-O-methyladenosine-3'-phosphorothioate
  modified_base 2: mod_base = OTHER; note = 2'-fluorouridine -3'-phosphorothioate
  modified_base 3: mod_base = OTHER; note = 2'-O-methylcytidine-3'-phosphate
  modified_base 4: mod_base = OTHER; note = 2'-O-methyladenosine-3'-phosphate
  modified_base 5: mod_base = OTHER; note = 2'-O-methyladenosine-3'-phosphate
  modified_base 6: mod_base = OTHER; note = 2'-O-methyluridine-3'-phosphate
  modified_base 7: mod_base = OTHER; note = Guanosine-glycol nucleic acid (GNA)
  modified_base 8: mod_base = OTHER; note = 2'-O-methyladenosine-3'-phosphate
  modified_base 9: mod_base = OTHER; note = 2'-O-methylcytidine-3'-phosphate
  modified_base 10: mod_base = OTHER; note = 2'-O-methyladenosine-3'-phosphate
  modified_base 11: mod_base = OTHER; note = 2'-O-methylguanosine-3'-phosphate
  modified_base 12: mod_base = OTHER; note = 2'-O-methyluridine-3'-phosphate
  modified_base 13: mod_base = OTHER; note = 2'-O-methyladenosine-3'-phosphate
  modified_base 14: mod_base = OTHER; note = 2'-fluoroadenosine-3'-phosphate
  modified_base 15: mod_base = OTHER; note = 2'-O-methyluridine-3'-phosphate
  modified_base 16: mod_base = OTHER; note = 2'-fluorouridine-3'-phosphate
  modified_base 17: mod_base = OTHER; note = 2'-O-methylguanosine-3'-phosphate
  modified_base 18: mod_base = OTHER; note = 2'-O-methylguanosine-3'-phosphate
  modified_base 19: mod_base = OTHER; note = 2'-O-methylguanosine-3'-phosphate
  modified_base 20: mod_base = OTHER; note = 2'-O-methyluridine-3'-phosphate
  modified_base 21: mod_base = OTHER; note = 2'-O-methylcytidine-3'-phosphorothioate
  modified_base 22: mod_base = OTHER; note = 2'-O-methylcytidine-3'-phosphorothioate
  modified_base 23: mod_base = OTHER; note = 2'-O-methylcytidine-3'-phosphate
atcaatgacagtaattgggtccc

SEQ ID NO: 300 - RNA, 23 nt, synthetic construct
  misc_feature 1..23: note = Description of Artificial Sequence: Synthetic oligonucleotide
  source 1..23: mol_type = other RNA
  modified_base 1: mod_base = OTHER; note = 2'-O-methyladenosine-3'-phosphorothioate
  modified_base 2: mod_base = OTHER; note = 2'-fluoroadenosine-3'-phosphorothioate
  modified_base 3: mod_base = OTHER; note = 2'-O-methylcytidine-3'-phosphate
  modified_base 4: mod_base = OTHER; note = 2'-O-methylguanosine-3'-phosphate
  modified_base 5: mod_base = OTHER; note = 2'-O-methyluridine-3'-phosphate
  modified_base 6: mod_base = OTHER; note = 2'-O-methylcytidine-3'-phosphate
  modified_base 7: mod_base = OTHER; note = Adenosine-glycol nucleic acid (GNA)
  modified_base 8: mod_base = OTHER; note = 2'-O-methyluridine-3'-phosphate
  modified_base 9: mod_base = OTHER; note = 2'-O-methyladenosine-3'-phosphate
  modified_base 10: mod_base = OTHER; note = 2'-O-methylguanosine-3'-phosphate
  modified_base 11: mod_base = OTHER; note = 2'-O-methyluridine-3'-phosphate
  modified_base 12: mod_base = OTHER; note = 2'-O-methylcytidine-3'-phosphate
  modified_base 13: mod_base = OTHER; note = 2'-O-methyladenosine-3'-phosphate
  modified_base 14: mod_base = OTHER; note = 2'-fluorouridine-3'-phosphate
  modified_base 15: mod_base = OTHER; note = 2'-O-methyladenosine-3'-phosphate
  modified_base 16: mod_base = OTHER; note = 2'-fluoroadenosine-3'-phosphate
  modified_base 17: mod_base = OTHER; note = 2'-O-methyladenosine-3'-phosphate
  modified_base 18: mod_base = OTHER; note = 2'-O-methyladenosine-3'-phosphate
  modified_base 19: mod_base = OTHER; note = 2'-O-methyluridine-3'-phosphate
  modified_base 20: mod_base = OTHER; note = 2'-O-methyluridine-3'-phosphate
  modified_base 21: mod_base = OTHER; note = 2'-O-methylcytidine-3'-phosphorothioate
  modified_base 22: mod_base = OTHER; note = 2'-O-methyladenosine-3'-phosphorothioate
  modified_base 23: mod_base = OTHER; note = 2'-O-methylguanosine-3'-phosphate
aacgtcatagtcataaaattcag

SEQ ID NO: 301 - RNA, 23 nt, synthetic construct
  misc_feature 1..23: note = Description of Artificial Sequence: Synthetic oligonucleotide
  source 1..23: mol_type = other RNA
  modified_base 1: mod_base = OTHER; note = 2'-O-methyladenosine-3'-phosphorothioate
  modified_base 2: mod_base = OTHER; note = 2'-fluorouridine -3'-phosphorothioate
  modified_base 3: mod_base = OTHER; note = 2'-O-methylguanosine-3'-phosphate
  modified_base 4: mod_base = OTHER; note = 2'-O-methyluridine-3'-phosphate
  modified_base 5: mod_base = OTHER; note = 2'-O-methylcytidine-3'-phosphate
  modified_base 6: mod_base = OTHER; note = 2'-O-methylcytidine-3'-phosphate
  modified_base 7: mod_base = OTHER; note = Adenosine-glycol nucleic acid (GNA)
  modified_base 8: mod_base = OTHER; note = 2'-O-methyladenosine-3'-phosphate
  modified_base 9: mod_base = OTHER; note = 2'-O-methylguanosine-3'-phosphate
  modified_base 10: mod_base = OTHER; note = 2'-O-methylcytidine-3'-phosphate
  modified_base 11: mod_base = OTHER; note = 2'-O-methyluridine-3'-phosphate
  modified_base 12: mod_base = OTHER; note = 2'-O-methylguanosine-3'-phosphate
  modified_base 13: mod_base = OTHER; note = 2'-O-methyladenosine-3'-phosphate
  modified_base 14: mod_base = OTHER; note = 2'-fluoroadenosine-3'-phosphate
  modified_base 15: mod_base = OTHER; note = 2'-O-methyladenosine-3'-phosphate
  modified_base 16: mod_base = OTHER; note = 2'-fluorocytidine-3'-phosphate
  modified_base 17: mod_base = OTHER; note = 2'-O-methyluridine-3'-phosphate
  modified_base 18: mod_base = OTHER; note = 2'-O-methylcytidine-3'-phosphate
  modified_base 19: mod_base = OTHER; note = 2'-O-methylcytidine-3'-phosphate
  modified_base 20: mod_base = OTHER; note = 2'-O-methyladenosine-3'-phosphate
  modified_base 21: mod_base = OTHER; note = 2'-O-methylguanosine-3'-phosphorothioate
  modified_base 22: mod_base = OTHER; note = 2'-O-methyladenosine-3'-phosphorothioate
  modified_base 23: mod_base = OTHER; note = 2'-O-methylcytidine-3'-phosphate
atgtccaagctgaaactccagac

SEQ ID NO: 302 - RNA, 23 nt, synthetic construct
  misc_feature 1..23: note = Description of Artificial Sequence: Synthetic oligonucleotide
  source 1..23: mol_type = other RNA
  modified_base 1: mod_base = OTHER; note = 2'-O-methyladenosine-3'-phosphorothioate
  modified_base 2: mod_base = OTHER; note = 2'-fluorocytidine-3'-phosphorothioate
  modified_base 3: mod_base = OTHER; note = 2'-O-methyladenosine-3'-phosphate
  modified_base 4: mod_base = OTHER; note = 2'-O-methyladenosine-3'-phosphate
  modified_base 5: mod_base = OTHER; note = 2'-O-methyluridine-3'-phosphate
  modified_base 6: mod_base = OTHER; note = 2'-O-methyluridine-3'-phosphate
  modified_base 7: mod_base = OTHER; note = Adenosine-glycol nucleic acid (GNA)
  modified_base 8: mod_base = OTHER; note = 2'-O-methyladenosine-3'-phosphate
  modified_base 9: mod_base = OTHER; note = 2'-O-methylguanosine-3'-phosphate
  modified_base 10: mod_base = OTHER; note = 2'-O-methyluridine-3'-phosphate
  modified_base 11: mod_base = OTHER; note = 2'-O-methyluridine-3'-phosphate
  modified_base 12: mod_base = OTHER; note = 2'-O-methylguanosine-3'-phosphate
  modified_base 13: mod_base = OTHER; note = 2'-O-methyladenosine-3'-phosphate
  modified_base 14: mod_base = OTHER; note = 2'-fluorocytidine-3'-phosphate
  modified_base 15: mod_base = OTHER; note = 2'-O-methyluridine-3'-phosphate
  modified_base 16: mod_base = OTHER; note = 2'-fluoroadenosine-3'-phosphate
  modified_base 17: mod_base = OTHER; note = 2'-O-methylguanosine-3'-phosphate
  modified_base 18: mod_base = OTHER; note = 2'-O-methyladenosine-3'-phosphate
  modified_base 19: mod_base = OTHER; note = 2'-O-methylcytidine-3'-phosphate
  modified_base 20: mod_base = OTHER; note = 2'-O-methyladenosine-3'-phosphate
  modified_base 21: mod_base = OTHER; note = 2'-O-methylcytidine-3'-phosphorothioate
  modified_base 22: mod_base = OTHER; note = 2'-O-methyluridine-3'-phosphorothioate
  modified_base 23: mod_base = OTHER; note = 2'-O-methyluridine-3'-phosphate
acaattaagttgactagacactt

SEQ ID NO: 303 - DNA, 23 bp, synthetic construct
  misc_feature 1..23: note = Description of Artificial Sequence: Synthetic oligonucleotide
  source 1..23: mol_type = other DNA
  modified_base 1: mod_base = OTHER; note = 2'-O-methyladenosine-3'-phosphorothioate
  modified_base 2: mod_base = OTHER; note = 2'-fluoroguanosine-3'-phosphorothioate
  modified_base 3: mod_base = OTHER; note = 2'-O-methylcytidine-3'-phosphate
  modified_base 4: mod_base = OTHER; note = 2'-O-methyluridine-3'-phosphate
  modified_base 5: mod_base = OTHER; note = 2'-O-methylcytidine-3'-phosphate
  modified_base 6: mod_base = OTHER; note = 2'-O-methyladenosine-3'-phosphate
  modified_base 7: mod_base = OTHER; note = Thymidine-glycol nucleic acid (GNA) S-Isomer
  modified_base 8: mod_base = OTHER; note = 2'-O-methyluridine-3'-phosphate
  modified_base 9: mod_base = OTHER; note = 2'-O-methylguanosine-3'-phosphate
  modified_base 10: mod_base = OTHER; note = 2'-O-methyluridine-3'-phosphate
  modified_base 11: mod_base = OTHER; note = 2'-O-methylcytidine-3'-phosphate
  modified_base 12: mod_base = OTHER; note = 2'-O-methyluridine-3'-phosphate
  modified_base 13: mod_base = OTHER; note = 2'-O-methyluridine-3'-phosphate
  modified_base 14: mod_base = OTHER; note = 2'-fluorouridine-3'-phosphate
  modified_base 15: mod_base = OTHER; note = 2'-O-methylcytidine-3'-phosphate
  modified_base 16: mod_base = OTHER; note = 2'-fluorouridine-3'-phosphate
  modified_base 17: mod_base = OTHER; note = 2'-O-methyluridine-3'-phosphate
  modified_base 18: mod_base = OTHER; note = 2'-O-methylguanosine-3'-phosphate
  modified_base 19: mod_base = OTHER; note = 2'-O-methylguanosine-3'-phosphate
  modified_base 20: mod_base = OTHER; note = 2'-O-methyladenosine-3'-phosphate
  modified_base 21: mod_base = OTHER; note = 2'-O-methyladenosine-3'-phosphorothioate
  modified_base 22: mod_base = OTHER; note = 2'-O-methylguanosine-3'-phosphorothioate
  modified_base 23: mod_base = OTHER; note = 2'-O-methylcytidine-3'-phosphate
  misc_feature 1..6: note = RNA
  misc_feature 7: note = DNA
  misc_feature 8..23: note = RNA
agctcattgtctttcttggaagc

SEQ ID NO: 304 - DNA, 23 bp, synthetic construct
  misc_feature 1..23: note = Description of Artificial Sequence: Synthetic oligonucleotide
  source 1..23: mol_type = other DNA
  modified_base 1: mod_base = OTHER; note = 2'-O-methyladenosine-3'-phosphorothioate
  modified_base 2: mod_base = OTHER; note = 2'-fluoroguanosine-3'-phosphorothioate
  modified_base 3: mod_base = OTHER; note = 2'-O-methyladenosine-3'-phosphate
  modified_base 4: mod_base = OTHER; note = 2'-O-methylguanosine-3'-phosphate
  modified_base 5: mod_base = OTHER; note = 2'-O-methyluridine-3'-phosphate
  modified_base 6: mod_base = OTHER; note = 2'-O-methylguanosine-3'-phosphate
  modified_base 7: mod_base = OTHER; note = Thymidine-glycol nucleic acid (GNA) S-Isomer
  modified_base 8: mod_base = OTHER; note = 2'-O-methyladenosine-3'-phosphate
  modified_base 9: mod_base = OTHER; note = 2'-O-methyladenosine-3'-phosphate
  modified_base 10: mod_base = OTHER; note = 2'-O-methylcytidine-3'-phosphate
  modified_base 11: mod_base = OTHER; note = 2'-O-methylcytidine-3'-phosphate
  modified_base 12: mod_base = OTHER; note = 2'-O-methylguanosine-3'-phosphate
  modified_base 13: mod_base = OTHER; note = 2'-O-methyluridine-3'-phosphate
  modified_base 14: mod_base = OTHER; note = 2'-fluorocytidine-3'-phosphate
  modified_base 15: mod_base = OTHER; note = 2'-O-methyladenosine-3'-phosphate
  modified_base 16: mod_base = OTHER; note = 2'-fluorouridine-3'-phosphate
  modified_base 17: mod_base = OTHER; note = 2'-O-methyladenosine-3'-phosphate
  modified_base 18: mod_base = OTHER; note = 2'-O-methylguanosine-3'-phosphate
  modified_base 19: mod_base = OTHER; note = 2'-O-methylcytidine-3'-phosphate
  modified_base 20: mod_base = OTHER; note = 2'-O-methyladenosine-3'-phosphate
  modified_base 21: mod_base = OTHER; note = 2'-O-methylguanosine-3'-phosphorothioate
  modified_base 22: mod_base = OTHER; note = 2'-O-methyluridine-3'-phosphorothioate
  modified_base 23: mod_base = OTHER; note = 2'-O-methylguanosine-3'-phosphate
  misc_feature 1..6: note = RNA
  misc_feature 7: note = DNA
  misc_feature 8..23: note = RNA
agagtgtaaccgtcatagcagtg

SEQ ID NO: 305 - DNA, 23 bp, synthetic construct
  misc_feature 1..23: note = Description of Artificial Sequence: Synthetic oligonucleotide
  source 1..23: mol_type = other DNA
  modified_base 1: mod_base = OTHER; note = 2'-O-methyladenosine-3'-phosphorothioate
  modified_base 2: mod_base = OTHER; note = 2'-fluorocytidine-3'-phosphorothioate
  modified_base 3: mod_base = OTHER; note = 2'-O-methylcytidine-3'-phosphate
  modified_base 4: mod_base = OTHER; note = 2'-O-methyluridine-3'-phosphate
  modified_base 5: mod_base = OTHER; note = 2'-O-methyluridine-3'-phosphate
  modified_base 6: mod_base = OTHER; note = 2'-O-methylcytidine-3'-phosphate
  modified_base 7: mod_base = OTHER; note = Thymidine-glycol nucleic acid (GNA) S-Isomer
  modified_base 8: mod_base = OTHER; note = 2'-O-methylcytidine-3'-phosphate
  modified_base 9: mod_base = OTHER; note = 2'-O-methyladenosine-3'-phosphate
  modified_base 10: mod_base = OTHER; note = 2'-O-methyladenosine-3'-phosphate
  modified_base 11: mod_base = OTHER; note = 2'-O-methyluridine-3'-phosphate
  modified_base 12: mod_base = OTHER; note = 2'-O-methyluridine-3'-phosphate
  modified_base 13: mod_base = OTHER; note = 2'-O-methyladenosine-3'-phosphate
  modified_base 14: mod_base = OTHER; note = 2'-fluoroadenosine-3'-phosphate
  modified_base 15: mod_base = OTHER; note = 2'-O-methylguanosine-3'-phosphate
  modified_base 16: mod_base = OTHER; note = 2'-fluorouridine-3'-phosphate
  modified_base 17: mod_base = OTHER; note = 2'-O-methyluridine-3'-phosphate
  modified_base 18: mod_base = OTHER; note = 2'-O-methylguanosine-3'-phosphate
  modified_base 19: mod_base = OTHER; note = 2'-O-methyladenosine-3'-phosphate
  modified_base 20: mod_base = OTHER; note = 2'-O-methylcytidine-3'-phosphate
  modified_base 21: mod_base = OTHER; note = 2'-O-methyluridine-3'-phosphorothioate
  modified_base 22: mod_base = OTHER; note = 2'-O-methyladenosine-3'-phosphorothioate
  modified_base 23: mod_base = OTHER; note = 2'-O-methylguanosine-3'-phosphate
  misc_feature 1..6: note = RNA
  misc_feature 7: note = DNA
  misc_feature 8..23: note = RNA
accttctcaattaagttgactag

SEQ ID NO: 306 - DNA, 23 bp, synthetic construct
  misc_feature 1..23: note = Description of Artificial Sequence: Synthetic oligonucleotide
  source 1..23: mol_type = other DNA
  modified_base 1: mod_base = OTHER; note = 2'-O-methyladenosine-3'-phosphorothioate
  modified_base 2: mod_base = OTHER; note = 2'-fluoroadenosine-3'-phosphorothioate
  modified_base 3: mod_base = OTHER; note = 2'-O-methyluridine-3'-phosphate
  modified_base 4: mod_base = OTHER; note = 2'-O-methylcytidine-3'-phosphate
  modified_base 5: mod_base = OTHER; note = 2'-O-methylcytidine-3'-phosphate
  modified_base 6: mod_base = OTHER; note = 2'-O-methyluridine-3'-phosphate
  modified_base 7: mod_base = OTHER; note = Thymidine-glycol nucleic acid (GNA) S-Isomer
  modified_base 8: mod_base = OTHER; note = 2'-O-methylguanosine-3'-phosphate
  modified_base 9: mod_base = OTHER; note = 2'-O-methyladenosine-3'-phosphate
  modified_base 10: mod_base = OTHER; note = 2'-O-methylcytidine-3'-phosphate
  modified_base 11: mod_base = OTHER; note = 2'-O-methyluridine-3'-phosphate
  modified_base 12: mod_base = OTHER; note = 2'-O-methyluridine-3'-phosphate
  modified_base 13: mod_base = OTHER; note = 2'-O-methyluridine-3'-phosphate
  modified_base 14: mod_base = OTHER; note = 2'-fluoroguanosine-3'-phosphate
  modified_base 15: mod_base = OTHER; note = 2'-O-methyladenosine-3'-phosphate
  modified_base 16: mod_base = OTHER; note = 2'-fluoroadenosine-3'-phosphate
  modified_base 17: mod_base = OTHER; note = 2'-O-methylcytidine-3'-phosphate
  modified_base 18: mod_base = OTHER; note = 2'-O-methyladenosine-3'-phosphate
  modified_base 19: mod_base = OTHER; note = 2'-O-methylcytidine-3'-phosphate
  modified_base 20: mod_base = OTHER; note = 2'-O-methyladenosine-3'-phosphate
  modified_base 21: mod_base = OTHER; note = 2'-O-methyluridine-3'-phosphorothioate
  modified_base 22: mod_base = OTHER; note = 2'-O-methylguanosine-3'-phosphorothioate
  modified_base 23: mod_base = OTHER; note = 2'-O-methyluridine-3'-phosphate
  misc_feature 1..6: note = RNA
  misc_feature 7: note = DNA
  misc_feature 8..23: note = RNA
aatccttgactttgaacacatgt

SEQ ID NO: 307 - DNA, 23 bp, synthetic construct
  misc_feature 1..23: note = Description of Artificial Sequence: Synthetic oligonucleotide
  source 1..23: mol_type = other DNA
  modified_base 1: mod_base = OTHER; note = 2'-O-methyladenosine-3'-phosphorothioate
  modified_base 2: mod_base = OTHER; note = 2'-fluorocytidine-3'-phosphorothioate
  modified_base 3: mod_base = OTHER; note = 2'-O-methylguanosine-3'-phosphate
  modified_base 4: mod_base = OTHER; note = 2'-O-methyluridine-3'-phosphate
  modified_base 5: mod_base = OTHER; note = 2'-O-methyluridine-3'-phosphate
  modified_base 6: mod_base = OTHER; note = 2'-O-methylguanosine-3'-phosphate
  modified_base 7: mod_base = OTHER; note = Thymidine-glycol nucleic acid (GNA) S-Isomer
  modified_base 8: mod_base = OTHER; note = 2'-O-methylcytidine-3'-phosphate
  modified_base 9: mod_base = OTHER; note = 2'-O-methyladenosine-3'-phosphate
  modified_base 10: mod_base = OTHER; note = 2'-O-methylcytidine-3'-phosphate
  modified_base 11: mod_base = OTHER; note = 2'-O-methyladenosine-3'-phosphate
  modified_base 12: mod_base = OTHER; note = 2'-O-methylguanosine-3'-phosphate
  modified_base 13: mod_base = OTHER; note = 2'-O-methyladenosine-3'-phosphate
  modified_base 14: mod_base = OTHER; note = 2'-fluorouridine-3'-phosphate
  modified_base 15: mod_base = OTHER; note = 2'-O-methylcytidine-3'-phosphate
  modified_base 16: mod_base = OTHER; note = 2'-fluoroguanosine-3'-phosphate
  modified_base 17: mod_base = OTHER; note = 2'-O-methylcytidine-3'-phosphate
  modified_base 18: mod_base = OTHER; note = 2'-O-methyluridine-3'-phosphate
  modified_base 19: mod_base = OTHER; note = 2'-O-methylguanosine-3'-phosphate
  modified_base 20: mod_base = OTHER; note = 2'-O-methyluridine-3'-phosphate
  modified_base 21: mod_base = OTHER; note = 2'-O-methylcytidine-3'-phosphorothioate
  modified_base 22: mod_base = OTHER; note = 2'-O-methyluridine-3'-phosphorothioate
  modified_base 23: mod_base = OTHER; note = 2'-O-methylguanosine-3'-phosphate
  misc_feature 1..6: note = RNA
  misc_feature 7: note = DNA
  misc_feature 8..23: note = RNA
acgttgtcacagatcgctgtctg

SEQ ID NO: 308 - RNA, 23 nt, synthetic construct
  misc_feature 1..23: note = Description of Artificial Sequence: Synthetic oligonucleotide
  source 1..23: mol_type = other RNA
  modified_base 1: mod_base = OTHER; note = 2'-O-methyladenosine-3'-phosphorothioate
  modified_base 2: mod_base = OTHER; note = 2'-fluoroadenosine-3'-phosphorothioate
  modified_base 3: mod_base = OTHER; note = 2'-O-methylcytidine-3'-phosphate
  modified_base 4: mod_base = OTHER; note = 2'-O-methyluridine-3'-phosphate
  modified_base 5: mod_base = OTHER; note = 2'-O-methyladenosine-3'-phosphate
  modified_base 6: mod_base = OTHER; note = 2'-O-methylguanosine-3'-phosphate
  modified_base 7: mod_base = OTHER; note = Adenosine-glycol nucleic acid (GNA)
  modified_base 8: mod_base = OTHER; note = 2'-O-methylcytidine-3'-phosphate
  modified_base 9: mod_base = OTHER; note = 2'-O-methyladenosine-3'-phosphate
  modified_base 10: mod_base = OTHER; note = 2'-O-methylcytidine-3'-phosphate
  modified_base 11: mod_base = OTHER; note = 2'-O-methyluridine-3'-phosphate
  modified_base 12: mod_base = OTHER; note = 2'-O-methyluridine-3'-phosphate
  modified_base 13: mod_base = OTHER; note = 2'-O-methyluridine-3'-phosphate
  modified_base 14: mod_base = OTHER; note = 2'-fluorouridine-3'-phosphate
  modified_base 15: mod_base = OTHER; note = 2'-O-methyluridine-3'-phosphate
  modified_base 16: mod_base = OTHER; note = 2'-fluoroguanosine-3'-phosphate
  modified_base 17: mod_base = OTHER; note = 2'-O-methylguanosine-3'-phosphate
  modified_base 18: mod_base = OTHER; note = 2'-O-methylcytidine-3'-phosphate
  modified_base 19: mod_base = OTHER; note = 2'-O-methyluridine-3'-phosphate
  modified_base 20: mod_base = OTHER; note = 2'-O-methylcytidine-3'-phosphate
  modified_base 21: mod_base = OTHER; note = 2'-O-methylcytidine-3'-phosphorothioate
  modified_base 22: mod_base = OTHER; note = 2'-O-methyluridine-3'-phosphorothioate
  modified_base 23: mod_base = OTHER; note = 2'-O-methylguanosine-3'-phosphate
aactagacactttttggctcctg

SEQ ID NO: 309 - DNA, 23 bp, synthetic construct
  misc_feature 1..23: note = Description of Artificial Sequence: Synthetic oligonucleotide
  source 1..23: mol_type = other DNA
  modified_base 1: mod_base = OTHER; note = 2'-O-methyladenosine-3'-phosphorothioate
  modified_base 2: mod_base = OTHER; note = 2'-fluoroadenosine-3'-phosphorothioate
  modified_base 3: mod_base = OTHER; note = 2'-O-methyladenosine-3'-phosphate
  modified_base 4: mod_base = OTHER; note = 2'-O-methyladenosine-3'-phosphate
  modified_base 5: mod_base = OTHER; note = 2'-O-methylguanosine-3'-phosphate
  modified_base 6: mod_base = OTHER; note = 2'-O-methylcytidine-3'-phosphate
  modified_base 7: mod_base = OTHER; note = Thymidine-glycol nucleic acid (GNA) S-Isomer
  modified_base 8: mod_base = OTHER; note = 2'-O-methylcytidine-3'-phosphate
  modified_base 9: mod_base = OTHER; note = 2'-O-methylguanosine-3'-phosphate
  modified_base 10: mod_base = OTHER; note = 2'-O-methyladenosine-3'-phosphate
  modified_base 11: mod_base = OTHER; note = 2'-O-methylguanosine-3'-phosphate
  modified_base 12: mod_base = OTHER; note = 2'-O-methyluridine-3'-phosphate
  modified_base 13: mod_base = OTHER; note = 2'-O-methyluridine-3'-phosphate
  modified_base 14: mod_base = OTHER; note = 2'-fluoroguanosine-3'-phosphate
  modified_base 15: mod_base = OTHER; note = 2'-O-methyluridine-3'-phosphate
  modified_base 16: mod_base = OTHER; note = 2'-fluorouridine-3'-phosphate
  modified_base 17: mod_base = OTHER; note = 2'-O-methylcytidine-3'-phosphate
  modified_base 18: mod_base = OTHER; note = 2'-O-methylcytidine-3'-phosphate
  modified_base 19: mod_base = OTHER; note = 2'-O-methylcytidine-3'-phosphate
  modified_base 20: mod_base = OTHER; note = 2'-O-methyluridine-3'-phosphate
  modified_base 21: mod_base = OTHER; note = 2'-O-methylcytidine-3'-phosphorothioate
  modified_base 22: mod_base = OTHER; note = 2'-O-methylguanosine-3'-phosphorothioate
  modified_base 23: mod_base = OTHER; note = 2'-O-methylguanosine-3'-phosphate
  misc_feature 1..6: note = RNA
  misc_feature 7: note = DNA
  misc_feature 8..23: note = RNA
aaaagctcgagttgttccctcgg

SEQ ID NO: 310 - RNA, 23 nt, synthetic construct
  misc_feature 1..23: note = Description of Artificial Sequence: Synthetic oligonucleotide
  source 1..23: mol_type = other RNA
  modified_base 1: mod_base = OTHER; note = 2'-O-methyladenosine-3'-phosphorothioate
  modified_base 2: mod_base = OTHER; note = 2'-fluoroadenosine-3'-phosphorothioate
  modified_base 3: mod_base = OTHER; note = 2'-O-methylguanosine-3'-phosphate
  modified_base 4: mod_base = OTHER; note = 2'-O-methyluridine-3'-phosphate
  modified_base 5: mod_base = OTHER; note = 2'-O-methylguanosine-3'-phosphate
  modified_base 6: mod_base = OTHER; note = 2'-O-methyluridine-3'-phosphate
  modified_base 7: mod_base = OTHER; note = Adenosine-glycol nucleic acid (GNA)
  modified_base 8: mod_base = OTHER; note = 2'-O-methyladenosine-3'-phosphate
  modified_base 9: mod_base = OTHER; note = 2'-O-methylcytidine-3'-phosphate
  modified_base 10: mod_base = OTHER; note = 2'-O-methylcytidine-3'-phosphate
  modified_base 11: mod_base = OTHER; note = 2'-O-methylguanosine-3'-phosphate
  modified_base 12: mod_base = OTHER; note = 2'-O-methyluridine-3'-phosphate
  modified_base 13: mod_base = OTHER; note = 2'-O-methylcytidine-3'-phosphate
  modified_base 14: mod_base = OTHER; note = 2'-fluoroadenosine-3'-phosphate
  modified_base 15: mod_base = OTHER; note = 2'-O-methyluridine-3'-phosphate
  modified_base 16: mod_base = OTHER; note = 2'-fluoroadenosine-3'-phosphate
  modified_base 17: mod_base = OTHER; note = 2'-O-methylguanosine-3'-phosphate
  modified_base 18: mod_base = OTHER; note = 2'-O-methylcytidine-3'-phosphate
  modified_base 19: mod_base = OTHER; note = 2'-O-methyladenosine-3'-phosphate
  modified_base 20: mod_base = OTHER; note = 2'-O-methylguanosine-3'-phosphate
  modified_base 21: mod_base = OTHER; note = 2'-O-methyluridine-3'-phosphorothioate
  modified_base 22: mod_base = OTHER; note = 2'-O-methylguanosine-3'-phosphorothioate
  modified_base 23: mod_base = OTHER; note = 2'-O-methylguanosine-3'-phosphate
aagtgtaaccgtcatagcagtgg

SEQ ID NO: 311 - DNA, 23 bp, synthetic construct
  misc_feature 1..23: note = Description of Artificial Sequence: Synthetic oligonucleotide
  source 1..23: mol_type = other DNA
  modified_base 1: mod_base = OTHER; note = 2'-O-methyladenosine-3'-phosphorothioate
  modified_base 2: mod_base = OTHER; note = 2'-fluorocytidine-3'-phosphorothioate
  modified_base 3: mod_base = OTHER; note = 2'-O-methylguanosine-3'-phosphate
  modified_base 4: mod_base = OTHER; note = 2'-O-methyluridine-3'-phosphate
  modified_base 5: mod_base = OTHER; note = 2'-O-methylcytidine-3'-phosphate
  modified_base 6: mod_base = OTHER; note = 2'-O-methyladenosine-3'-phosphate
  modified_base 7: mod_base = OTHER; note = Thymidine-glycol nucleic acid (GNA) S-Isomer
  modified_base 8: mod_base = OTHER; note = 2'-O-methyladenosine-3'-phosphate
  modified_base 9: mod_base = OTHER; note = 2'-O-methylguanosine-3'-phosphate
  modified_base 10: mod_base = OTHER; note = 2'-O-methylcytidine-3'-phosphate
  modified_base 11: mod_base = OTHER; note = 2'-O-methyladenosine-3'-phosphate
  modified_base 12: mod_base = OTHER; note = 2'-O-methylguanosine-3'-phosphate
  modified_base 13: mod_base = OTHER; note = 2'-O-methyluridine-3'-phosphate
  modified_base 14: mod_base = OTHER; note = 2'-fluoroguanosine-3'-phosphate
  modified_base 15: mod_base = OTHER; note = 2'-O-methylguanosine-3'-phosphate
  modified_base 16: mod_base = OTHER; note = 2'-fluoroadenosine-3'-phosphate
  modified_base 17: mod_base = OTHER; note = 2'-O-methyladenosine-3'-phosphate
  modified_base 18: mod_base = OTHER; note = 2'-O-methyladenosine-3'-phosphate
  modified_base 19: mod_base = OTHER; note = 2'-O-methylguanosine-3'-phosphate
  modified_base 20: mod_base = OTHER; note = 2'-O-methyladenosine-3'-phosphate
  modified_base 21: mod_base = OTHER; note = 2'-O-methylguanosine-3'-phosphorothioate
  modified_base 22: mod_base = OTHER; note = 2'-O-methyladenosine-3'-phosphorothioate
  modified_base 23: mod_base = OTHER; note = 2'-O-methyluridine-3'-phosphate
  misc_feature 1..6: note = RNA
  misc_feature 7: note = DNA
  misc_feature 8..23: note = RNA
acgtcatagcagtggaaagagat

SEQ ID NO: 312 - RNA, 23 nt, synthetic construct
  misc_feature 1..23: note = Description of Artificial Sequence: Synthetic oligonucleotide
  source 1..23: mol_type = other RNA
  modified_base 1: mod_base = OTHER; note = 2'-O-methyladenosine-3'-phosphorothioate
  modified_base 2: mod_base = OTHER; note = 2'-fluoroguanosine-3'-phosphorothioate
  modified_base 3: mod_base = OTHER; note = 2'-O-methyladenosine-3'-phosphate
  modified_base 4: mod_base = OTHER; note = 2'-O-methyladenosine-3'-phosphate
  modified_base 5: mod_base = OTHER; note = 2'-O-methylguanosine-3'-phosphate
  modified_base 6: mod_base = OTHER; note = 2'-O-methylcytidine-3'-phosphate
  modified_base 7: mod_base = OTHER; note = Cytidine-glycol nucleic acid (GNA)
  modified_base 8: mod_base = OTHER; note = 2'-O-methyluridine-3'-phosphate
  modified_base 9: mod_base = OTHER; note = 2'-O-methylcytidine-3'-phosphate
  modified_base 10: mod_base = OTHER; note = 2'-O-methyladenosine-3'-phosphate
  modified_base 11: mod_base = OTHER; note = 2'-O-methyladenosine-3'-phosphate
  modified_base 12: mod_base = OTHER; note = 2'-O-methyladenosine-3'-phosphate
  modified_base 13: mod_base = OTHER; note = 2'-O-methylguanosine-3'-phosphate
  modified_base 14: mod_base = OTHER; note = 2'-fluorocytidine-3'-phosphate
  modified_base 15: mod_base = OTHER; note = 2'-O-methyluridine-3'-phosphate
  modified_base 16: mod_base = OTHER; note = 2'-fluorocytidine-3'-phosphate
  modified_base 17: mod_base = OTHER; note = 2'-O-methylguanosine-3'-phosphate
  modified_base 18: mod_base = OTHER; note = 2'-O-methyladenosine-3'-phosphate
  modified_base 19: mod_base = OTHER; note = 2'-O-methylguanosine-3'-phosphate
  modified_base 20: mod_base = OTHER; note = 2'-O-methyluridine-3'-phosphate
  modified_base 21: mod_base = OTHER; note = 2'-O-methyluridine-3'-phosphorothioate
  modified_base 22: mod_base = OTHER; note = 2'-O-methylguanosine-3'-phosphorothioate
  modified_base 23: mod_base = OTHER; note = 2'-O-methyluridine-3'-phosphate
agaagcctcaaagctcgagttgt

SEQ ID NO: 313 - RNA, 23 nt, synthetic construct
  misc_feature 1..23: note = Description of Artificial Sequence: Synthetic oligonucleotide
  source 1..23: mol_type = other RNA
  modified_base 1: mod_base = OTHER; note = 2'-O-methyladenosine-3'-phosphorothioate
  modified_base 2: mod_base = OTHER; note = 2'-fluorouridine -3'-phosphorothioate
  modified_base 3: mod_base = OTHER; note = 2'-O-methyluridine-3'-phosphate
  modified_base 4: mod_base = OTHER; note = 2'-O-methylguanosine-3'-phosphate
  modified_base 5: mod_base = OTHER; note = 2'-O-methyluridine-3'-phosphate
  modified_base 6: mod_base = OTHER; note = 2'-O-methylcytidine-3'-phosphate
  modified_base 7: mod_base = OTHER; note = Adenosine-glycol nucleic acid (GNA)
  modified_base 8: mod_base = OTHER; note = 2'-O-methylcytidine-3'-phosphate
  modified_base 9: mod_base = OTHER; note = 2'-O-methyladenosine-3'-phosphate
  modified_base 10: mod_base = OTHER; note = 2'-O-methylguanosine-3'-phosphate
  modified_base 11: mod_base = OTHER; note = 2'-O-methyladenosine-3'-phosphate
  modified_base 12: mod_base = OTHER; note = 2'-O-methyluridine-3'-phosphate
  modified_base 13: mod_base = OTHER; note = 2'-O-methylcytidine-3'-phosphate
  modified_base 14: mod_base = OTHER; note = 2'-fluoroguanosine-3'-phosphate
  modified_base 15: mod_base = OTHER; note = 2'-O-methylcytidine-3'-phosphate
  modified_base 16: mod_base = OTHER; note = 2'-fluorouridine-3'-phosphate
  modified_base 17: mod_base = OTHER; note = 2'-O-methylguanosine-3'-phosphate
  modified_base 18: mod_base = OTHER; note = 2'-O-methyluridine-3'-phosphate
  modified_base 19: mod_base = OTHER; note = 2'-O-methylcytidine-3'-phosphate
  modified_base 20: mod_base = OTHER; note = 2'-O-methyluridine-3'-phosphate
  modified_base 21: mod_base = OTHER; note = 2'-O-methylguanosine-3'-phosphorothioate
  modified_base 22: mod_base = OTHER; note = 2'-O-methylcytidine-3'-phosphorothioate
  modified_base 23: mod_base = OTHER; note = 2'-O-methylcytidine-3'-phosphate
attgtcacagatcgctgtctgcc

SEQ ID NO: 314 - RNA, 23 nt, synthetic construct
  misc_feature 1..23: note = Description of Artificial Sequence: Synthetic oligonucleotide
  source 1..23: mol_type = other RNA
  modified_base 1: mod_base = OTHER; note = 2'-O-methyladenosine-3'-phosphorothioate
  modified_base 2: mod_base = OTHER; note = 2'-fluorouridine -3'-phosphorothioate
  modified_base 3: mod_base = OTHER; note = 2'-O-methyladenosine-3'-phosphate
  modified_base 4: mod_base = OTHER; note = 2'-O-methylcytidine-3'-phosphate
  modified_base 5: mod_base = OTHER; note = 2'-O-methylguanosine-3'-phosphate
  modified_base 6: mod_base = OTHER; note = 2'-O-methylguanosine-3'-phosphate
  modified_base 7: mod_base = OTHER; note = Guanosine-glycol nucleic acid (GNA)
  modified_base 8: mod_base = OTHER; note = 2'-O-methyluridine-3'-phosphate
  modified_base 9: mod_base = OTHER; note = 2'-O-methyladenosine-3'-phosphate
  modified_base 10: mod_base = OTHER; note = 2'-O-methylguanosine-3'-phosphate
  modified_base 11: mod_base = OTHER; note = 2'-O-methyladenosine-3'-phosphate
  modified_base 12: mod_base = OTHER; note = 2'-O-methyladenosine-3'-phosphate
  modified_base 13: mod_base = OTHER; note = 2'-O-methylguanosine-3'-phosphate
  modified_base 14: mod_base = OTHER; note = 2'-fluorocytidine-3'-phosphate
  modified_base 15: mod_base = OTHER; note = 2'-O-methylcytidine-3'-phosphate
  modified_base 16: mod_base = OTHER; note = 2'-fluoroadenosine-3'-phosphate
  modified_base 17: mod_base = OTHER; note = 2'-O-methylguanosine-3'-phosphate
  modified_base 18: mod_base = OTHER; note = 2'-O-methyladenosine-3'-phosphate
  modified_base 19: mod_base = OTHER; note = 2'-O-methyladenosine-3'-phosphate
  modified_base 20: mod_base = OTHER; note = 2'-O-methylguanosine-3'-phosphate
  modified_base 21: mod_base = OTHER; note = 2'-O-methylguanosine-3'-phosphorothioate
  modified_base 22: mod_base = OTHER; note = 2'-O-methyladenosine-3'-phosphorothioate
  modified_base 23: mod_base = OTHER; note = 2'-O-methylcytidine-3'-phosphate
atacgggtagaagccagaaggac

SEQ ID NO: 315 - RNA, 23 nt, synthetic construct
  misc_feature 1..23: note = Description of Artificial Sequence: Synthetic oligonucleotide
  source 1..23: mol_type = other RNA
  modified_base 1: mod_base = OTHER; note = 2'-O-methyladenosine-3'-phosphorothioate
  modified_base 2: mod_base = OTHER; note = 2'-fluoroguanosine-3'-phosphorothioate
  modified_base 3: mod_base = OTHER; note = 2'-O-methylcytidine-3'-phosphate
  modified_base 4: mod_base = OTHER; note = 2'-O-methyladenosine-3'-phosphate
  modified_base 5: mod_base = OTHER; note = 2'-O-methyluridine-3'-phosphate
  modified_base 6: mod_base = OTHER; note = 2'-O-methylcytidine-3'-phosphate
  modified_base 7: mod_base = OTHER; note = Guanosine-glycol nucleic acid (GNA)
  modified_base 8: mod_base = OTHER; note = 2'-O-methyladenosine-3'-phosphate
  modified_base 9: mod_base = OTHER; note = 2'-O-methylcytidine-3'-phosphate
  modified_base 10: mod_base = OTHER; note = 2'-O-methyluridine-3'-phosphate
  modified_base 11: mod_base = OTHER; note = 2'-O-methylcytidine-3'-phosphate
  modified_base 12: mod_base = OTHER; note = 2'-O-methylcytidine-3'-phosphate
  modified_base 13: mod_base = OTHER; note = 2'-O-methyluridine-3'-phosphate
  modified_base 14: mod_base = OTHER; note = 2'-fluorouridine-3'-phosphate
  modified_base 15: mod_base = OTHER; note = 2'-O-methylcytidine-3'-phosphate
  modified_base 16: mod_base = OTHER; note = 2'-fluorouridine-3'-phosphate
  modified_base 17: mod_base = OTHER; note = 2'-O-methyladenosine-3'-phosphate
  modified_base 18: mod_base = OTHER; note = 2'-O-methyluridine-3'-phosphate
  modified_base 19: mod_base = OTHER; note = 2'-O-methylguanosine-3'-phosphate
  modified_base 20: mod_base = OTHER; note = 2'-O-methylguanosine-3'-phosphate
  modified_base 21: mod_base = OTHER; note = 2'-O-methyluridine-3'-phosphorothioate
  modified_base 22: mod_base = OTHER; note = 2'-O-methylcytidine-3'-phosphorothioate
  modified_base 23: mod_base = OTHER; note = 2'-O-methyluridine-3'-phosphate
agcatcgactccttctatggtct

SEQ ID NO: 316 - DNA, 23 bp, synthetic construct
  misc_feature 1..23: note = Description of Artificial Sequence: Synthetic oligonucleotide
  source 1..23: mol_type = other DNA
  modified_base 1: mod_base = OTHER; note = 2'-O-methyladenosine-3'-phosphorothioate
  modified_base 2: mod_base = OTHER; note = 2'-fluoroadenosine-3'-phosphorothioate
  modified_base 3: mod_base = OTHER; note = 2'-O-methylguanosine-3'-phosphate
  modified_base 4: mod_base = OTHER; note = 2'-O-methylcytidine-3'-phosphate
  modified_base 5: mod_base = OTHER; note = 2'-O-methyladenosine-3'-phosphate
  modified_base 6: mod_base = OTHER; note = 2'-O-methyluridine-3'-phosphate
  modified_base 7: mod_base = OTHER; note = Thymidine-glycol nucleic acid (GNA) S-Isomer
  modified_base 8: mod_base = OTHER; note = 2'-O-methylguanosine-3'-phosphate
  modified_base 9: mod_base = OTHER; note = 2'-O-methyladenosine-3'-phosphate
  modified_base 10: mod_base = OTHER; note = 2'-O-methyluridine-3'-phosphate
  modified_base 11: mod_base = OTHER; note = 2'-O-methylguanosine-3'-phosphate
  modified_base 12: mod_base = OTHER; note = 2'-O-methyluridine-3'-phosphate
  modified_base 13: mod_base = OTHER; note = 2'-O-methyluridine-3'-phosphate
  modified_base 14: mod_base = OTHER; note = 2'-fluorocytidine-3'-phosphate
  modified_base 15: mod_base = OTHER; note = 2'-O-methyladenosine-3'-phosphate
  modified_base 16: mod_base = OTHER; note = 2'-fluorocytidine-3'-phosphate
  modified_base 17: mod_base = OTHER; note = 2'-O-methyluridine-3'-phosphate
  modified_base 18: mod_base = OTHER; note = 2'-O-methyluridine-3'-phosphate
  modified_base 19: mod_base = OTHER; note = 2'-O-methylguanosine-3'-phosphate
  modified_base 20: mod_base = OTHER; note = 2'-O-methylguanosine-3'-phosphate
  modified_base 21: mod_base = OTHER; note = 2'-O-methyluridine-3'-phosphorothioate
  modified_base 22: mod_base = OTHER; note = 2'-O-methyluridine-3'-phosphorothioate
  modified_base 23: mod_base = OTHER; note = 2'-O-methylcytidine-3'-phosphate
  misc_feature 1..6: note = RNA
  misc_feature 7: note = DNA
  misc_feature 8..23: note = RNA
aagcattgatgttcacttggttc

SEQ ID NO: 317 - DNA, 23 bp, synthetic construct
  misc_feature 1..23: note = Description of Artificial Sequence: Synthetic oligonucleotide
  source 1..23: mol_type = other DNA
  modified_base 1: mod_base = OTHER; note = 2'-O-methyladenosine-3'-phosphorothioate
  modified_base 2: mod_base = OTHER; note = 2'-fluoroguanosine-3'-phosphorothioate
  modified_base 3: mod_base = OTHER; note = 2'-O-methylguanosine-3'-phosphate
  modified_base 4: mod_base = OTHER; note = 2'-O-methyluridine-3'-phosphate
  modified_base 5: mod_base = OTHER; note = 2'-O-methylcytidine-3'-phosphate
  modified_base 6: mod_base = OTHER; note = 2'-O-methyluridine-3'-phosphate
  modified_base 7: mod_base = OTHER; note = Thymidine-glycol nucleic acid (GNA) S-Isomer
  modified_base 8: mod_base = OTHER; note = 2'-O-methylcytidine-3'-phosphate
  modified_base 9: mod_base = OTHER; note = 2'-O-methyladenosine-3'-phosphate
  modified_base 10: mod_base = OTHER; note = 2'-O-methyluridine-3'-phosphate
  modified_base 11: mod_base = OTHER; note = 2'-O-methyladenosine-3'-phosphate
  modified_base 12: mod_base = OTHER; note = 2'-O-methyladenosine-3'-phosphate
  modified_base 13: mod_base = OTHER; note = 2'-O-methyluridine-3'-phosphate
  modified_base 14: mod_base = OTHER; note = 2'-fluorouridine-3'-phosphate
  modified_base 15: mod_base = OTHER; note = 2'-O-methylguanosine-3'-phosphate
  modified_base 16: mod_base = OTHER; note = 2'-fluoroadenosine-3'-phosphate
  modified_base 17: mod_base = OTHER; note = 2'-O-methyluridine-3'-phosphate
  modified_base 18: mod_base = OTHER; note = 2'-O-methyluridine-3'-phosphate
  modified_base 19: mod_base = OTHER; note = 2'-O-methyluridine-3'-phosphate
  modified_base 20: mod_base = OTHER; note = 2'-O-methylcytidine-3'-phosphate
  modified_base 21: mod_base = OTHER; note = 2'-O-methyladenosine-3'-phosphorothioate
  modified_base 22: mod_base = OTHER; note = 2'-O-methyluridine-3'-phosphorothioate
  modified_base 23: mod_base = OTHER; note = 2'-O-methyluridine-3'-phosphate
  misc_feature 1..6: note = RNA
  misc_feature 7: note = DNA
  misc_feature 8..23: note = RNA
aggtcttcataattgatttcatt

SEQ ID NO: 318 - RNA, 23 nt, synthetic construct
  misc_feature 1..23: note = Description of Artificial Sequence: Synthetic oligonucleotide
  source 1..23: mol_type = other RNA
  modified_base 1: mod_base = OTHER; note = 2'-O-methyladenosine-3'-phosphorothioate
  modified_base 2: mod_base = OTHER; note = 2'-fluoroguanosine-3'-phosphorothioate
  modified_base 3: mod_base = OTHER; note = 2'-O-methyladenosine-3'-phosphate
  modified_base 4: mod_base = OTHER; note = 2'-O-methylcytidine-3'-phosphate
  modified_base 5: mod_base = OTHER; note = 2'-O-methyluridine-3'-phosphate
  modified_base 6: mod_base = OTHER; note = 2'-O-methyluridine-3'-phosphate
  modified_base 7: mod_base = OTHER; note = Cytidine-glycol nucleic acid (GNA)
  modified_base 8: mod_base = OTHER; note = 2'-O-methyluridine-3'-phosphate
  modified_base 9: mod_base = OTHER; note = 2'-O-methylcytidine-3'-phosphate
  modified_base 10: mod_base = OTHER; note = 2'-O-methyluridine-3'-phosphate
  modified_base 11: mod_base = OTHER; note = 2'-O-methyluridine-3'-phosphate
  modified_base 12: mod_base = OTHER; note = 2'-O-methylguanosine-3'-phosphate
  modified_base 13: mod_base = OTHER; note = 2'-O-methyluridine-3'-phosphate
  modified_base 14: mod_base = OTHER; note = 2'-fluoroguanosine-3'-phosphate
  modified_base 15: mod_base = OTHER; note = 2'-O-methyladenosine-3'-phosphate
  modified_base 16: mod_base = OTHER; note = 2'-fluoroadenosine-3'-phosphate
  modified_base 17: mod_base = OTHER; note = 2'-O-methylcytidine-3'-phosphate
  modified_base 18: mod_base = OTHER; note = 2'-O-methyluridine-3'-phosphate
  modified_base 19: mod_base = OTHER; note = 2'-O-methyladenosine-3'-phosphate
  modified_base 20: mod_base = OTHER; note = 2'-O-methyluridine-3'-phosphate
  modified_base 21: mod_base = OTHER; note = 2'-O-methylcytidine-3'-phosphorothioate
  modified_base 22: mod_base = OTHER; note = 2'-O-methyladenosine-3'-phosphorothioate
  modified_base 23: mod_base = OTHER; note = 2'-O-methyladenosine-3'-phosphate
agacttctcttgtgaactatcaa

SEQ ID NO: 319 - RNA, 23 nt, synthetic construct
  misc_feature 1..23: note = Description of Artificial Sequence: Synthetic oligonucleotide
  source 1..23: mol_type = other RNA
  modified_base 1: mod_base = OTHER; note = 2'-O-methyladenosine-3'-phosphorothioate
  modified_base 2: mod_base = OTHER; note = 2'-fluorouridine -3'-phosphorothioate
  modified_base 3: mod_base = OTHER; note = 2'-O-methyluridine-3'-phosphate
  modified_base 4: mod_base = OTHER; note = 2'-O-methylguanosine-3'-phosphate
  modified_base 5: mod_base = OTHER; note = 2'-O-methyluridine-3'-phosphate
  modified_base 6: mod_base = OTHER; note = 2'-O-methylguanosine-3'-phosphate
  modified_base 7: mod_base = OTHER; note = Guanosine-glycol nucleic acid (GNA)
  modified_base 8: mod_base = OTHER; note = 2'-O-methyluridine-3'-phosphate
  modified_base 9: mod_base = OTHER; note = 2'-O-methyladenosine-3'-phosphate
  modified_base 10: mod_base = OTHER; note = 2'-O-methyladenosine-3'-phosphate
  modified_base 11: mod_base = OTHER; note = 2'-O-methyluridine-3'-phosphate
  modified_base 12: mod_base = OTHER; note = 2'-O-methylcytidine-3'-phosphate
  modified_base 13: mod_base = OTHER; note = 2'-O-methylguanosine-3'-phosphate
  modified_base 14: mod_base = OTHER; note = 2'-fluoroguanosine-3'-phosphate
  modified_base 15: mod_base = OTHER; note = 2'-O-methyluridine-3'-phosphate
  modified_base 16: mod_base = OTHER; note = 2'-fluoroadenosine-3'-phosphate
  modified_base 17: mod_base = OTHER; note = 2'-O-methylcytidine-3'-phosphate
  modified_base 18: mod_base = OTHER; note = 2'-O-methylcytidine-3'-phosphate
  modified_base 19: mod_base = OTHER; note = 2'-O-methylcytidine-3'-phosphate
  modified_base 20: mod_base = OTHER; note = 2'-O-methyluridine-3'-phosphate
  modified_base 21: mod_base = OTHER; note = 2'-O-methyluridine-3'-phosphorothioate
  modified_base 22: mod_base = OTHER; note = 2'-O-methylcytidine-3'-phosphorothioate
  modified_base 23: mod_base = OTHER; note = 2'-O-methylcytidine-3'-phosphate
attgtggtaatcggtacccttcc

SEQ ID NO: 320 - RNA, 23 nt, synthetic construct
  misc_feature 1..23: note = Description of Artificial Sequence: Synthetic oligonucleotide
  source 1..23: mol_type = other RNA
  modified_base 1: mod_base = OTHER; note = 2'-O-methyladenosine-3'-phosphorothioate
  modified_base 2: mod_base = OTHER; note = 2'-fluorouridine -3'-phosphorothioate
  modified_base 3: mod_base = OTHER; note = 2'-O-methylcytidine-3'-phosphate
  modified_base 4: mod_base = OTHER; note = 2'-O-methylguanosine-3'-phosphate
  modified_base 5: mod_base = OTHER; note = 2'-O-methyluridine-3'-phosphate
  modified_base 6: mod_base = OTHER; note = 2'-O-methyladenosine-3'-phosphate
  modified_base 7: mod_base = OTHER; note = Cytidine-glycol nucleic acid (GNA)
  modified_base 8: mod_base = OTHER; note = 2'-O-methyladenosine-3'-phosphate
  modified_base 9: mod_base = OTHER; note = 2'-O-methyluridine-3'-phosphate
  modified_base 10: mod_base = OTHER; note = 2'-O-methylguanosine-3'-phosphate
  modified_base 11: mod_base = OTHER; note = 2'-O-methyladenosine-3'-phosphate
  modified_base 12: mod_base = OTHER; note = 2'-O-methyladenosine-3'-phosphate
  modified_base 13: mod_base = OTHER; note = 2'-O-methylguanosine-3'-phosphate
  modified_base 14: mod_base = OTHER; note = 2'-fluoroguanosine-3'-phosphate
  modified_base 15: mod_base = OTHER; note = 2'-O-methyladenosine-3'-phosphate
  modified_base 16: mod_base = OTHER; note = 2'-fluoroguanosine-3'-phosphate
  modified_base 17: mod_base = OTHER; note = 2'-O-methyluridine-3'-phosphate
  modified_base 18: mod_base = OTHER; note = 2'-O-methylcytidine-3'-phosphate
  modified_base 19: mod_base = OTHER; note = 2'-O-methyluridine-3'-phosphate
  modified_base 20: mod_base = OTHER; note = 2'-O-methyluridine-3'-phosphate
  modified_base 21: mod_base = OTHER; note = 2'-O-methylguanosine-3'-phosphorothioate
  modified_base 22: mod_base = OTHER; note = 2'-O-methylguanosine-3'-phosphorothioate
  modified_base 23: mod_base = OTHER; note = 2'-O-methylcytidine-3'-phosphate
atcgtacatgaaggagtcttggc

SEQ ID NO: 321 - RNA, 23 nt, synthetic construct
  misc_feature 1..23: note = Description of Artificial Sequence: Synthetic oligonucleotide
  source 1..23: mol_type = other RNA
  modified_base 1: mod_base = OTHER; note = 2'-O-methyladenosine-3'-phosphorothioate
  modified_base 2: mod_base = OTHER; note = 2'-fluorouridine -3'-phosphorothioate
  modified_base 3: mod_base = OTHER; note = 2'-O-methyladenosine-3'-phosphate
  modified_base 4: mod_base = OTHER; note = 2'-O-methylguanosine-3'-phosphate
  modified_base 5: mod_base = OTHER; note = 2'-O-methyladenosine-3'-phosphate
  modified_base 6: mod_base = OTHER; note = 2'-O-methylcytidine-3'-phosphate
  modified_base 7: mod_base = OTHER; note = Cytidine-glycol nucleic acid (GNA)
  modified_base 8: mod_base = OTHER; note = 2'-O-methyluridine-3'-phosphate
  modified_base 9: mod_base = OTHER; note = 2'-O-methylcytidine-3'-phosphate
  modified_base 10: mod_base = OTHER; note = 2'-O-methylcytidine-3'-phosphate
  modified_base 11: mod_base = OTHER; note = 2'-O-methyluridine-3'-phosphate
  modified_base 12: mod_base = OTHER; note = 2'-O-methyluridine-3'-phosphate
  modified_base 13: mod_base = OTHER; note = 2'-O-methylcytidine-3'-phosphate
  modified_base 14: mod_base = OTHER; note = 2'-fluorocytidine-3'-phosphate
  modified_base 15: mod_base = OTHER; note = 2'-O-methylguanosine-3'-phosphate
  modified_base 16: mod_base = OTHER; note = 2'-fluoroadenosine-3'-phosphate
  modified_base 17: mod_base = OTHER; note = 2'-O-methylguanosine-3'-phosphate
  modified_base 18: mod_base = OTHER; note = 2'-O-methyluridine-3'-phosphate
  modified_base 19: mod_base = OTHER; note = 2'-O-methylcytidine-3'-phosphate
  modified_base 20: mod_base = OTHER; note = 2'-O-methyladenosine-3'-phosphate
  modified_base 21: mod_base = OTHER; note = 2'-O-methylguanosine-3'-phosphorothioate
  modified_base 22: mod_base = OTHER; note = 2'-O-methylcytidine-3'-phosphorothioate
  modified_base 23: mod_base = OTHER; note = 2'-O-methyluridine-3'-phosphate
atagacctccttccgagtcagct

SEQ ID NO: 322 - DNA, 23 bp, synthetic construct
  misc_feature 1..23: note = Description of Artificial Sequence: Synthetic oligonucleotide
  source 1..23: mol_type = other DNA
  modified_base 1: mod_base = OTHER; note = 2'-O-methyladenosine-3'-phosphorothioate
  modified_base 2: mod_base = OTHER; note = 2'-fluoroadenosine-3'-phosphorothioate
  modified_base 3: mod_base = OTHER; note = 2'-O-methylcytidine-3'-phosphate
  modified_base 4: mod_base = OTHER; note = 2'-O-methylguanosine-3'-phosphate
  modified_base 5: mod_base = OTHER; note = 2'-O-methyladenosine-3'-phosphate
  modified_base 6: mod_base = OTHER; note = 2'-O-methylcytidine-3'-phosphate
  modified_base 7: mod_base = OTHER; note = Thymidine-glycol nucleic acid (GNA) S-Isomer
  modified_base 8: mod_base = OTHER; note = 2'-O-methyluridine-3'-phosphate
  modified_base 9: mod_base = OTHER; note = 2'-O-methylcytidine-3'-phosphate
  modified_base 10: mod_base = OTHER; note = 2'-O-methyluridine-3'-phosphate
  modified_base 11: mod_base = OTHER; note = 2'-O-methylcytidine-3'-phosphate
  modified_base 12: mod_base = OTHER; note = 2'-O-methyluridine-3'-phosphate
  modified_base 13: mod_base = OTHER; note = 2'-O-methyluridine-3'-phosphate
  modified_base 14: mod_base = OTHER; note = 2'-fluoroguanosine-3'-phosphate
  modified_base 15: mod_base = OTHER; note = 2'-O-methyluridine-3'-phosphate
  modified_base 16: mod_base = OTHER; note = 2'-fluoroguanosine-3'-phosphate
  modified_base 17: mod_base = OTHER; note = 2'-O-methyladenosine-3'-phosphate
  modified_base 18: mod_base = OTHER; note = 2'-O-methyladenosine-3'-phosphate
  modified_base 19: mod_base = OTHER; note = 2'-O-methylcytidine-3'-phosphate
  modified_base 20: mod_base = OTHER; note = 2'-O-methyluridine-3'-phosphate
  modified_base 21: mod_base = OTHER; note = 2'-O-methyladenosine-3'-phosphorothioate
  modified_base 22: mod_base = OTHER; note = 2'-O-methyluridine-3'-phosphorothioate
  modified_base 23: mod_base = OTHER; note = 2'-O-methylcytidine-3'-phosphate
  misc_feature 1..6: note = RNA
  misc_feature 7: note = DNA
  misc_feature 8..23: note = RNA
aacgacttctcttgtgaactatc

SEQ ID NO: 323 - RNA, 23 nt, synthetic construct
  misc_feature 1..23: note = Description of Artificial Sequence: Synthetic oligonucleotide
  source 1..23: mol_type = other RNA
  modified_base 1: mod_base = OTHER; note = 2'-O-methyladenosine-3'-phosphorothioate
  modified_base 2: mod_base = OTHER; note = 2'-fluorocytidine-3'-phosphorothioate
  modified_base 3: mod_base = OTHER; note = 2'-O-methylguanosine-3'-phosphate
  modified_base 4: mod_base = OTHER; note = 2'-O-methylcytidine-3'-phosphate
  modified_base 5: mod_base = OTHER; note = 2'-O-methyluridine-3'-phosphate
  modified_base 6: mod_base = OTHER; note = 2'-O-methyluridine-3'-phosphate
  modified_base 7: mod_base = OTHER; note = Cytidine-glycol nucleic acid (GNA)
  modified_base 8: mod_base = OTHER; note = 2'-O-methyluridine-3'-phosphate
  modified_base 9: mod_base = OTHER; note = 2'-O-methylguanosine-3'-phosphate
  modified_base 10: mod_base = OTHER; note = 2'-O-methylguanosine-3'-phosphate
  modified_base 11: mod_base = OTHER; note = 2'-O-methyluridine-3'-phosphate
  modified_base 12: mod_base = OTHER; note = 2'-O-methyluridine-3'-phosphate
  modified_base 13: mod_base = OTHER; note = 2'-O-methyluridine-3'-phosphate
  modified_base 14: mod_base = OTHER; note = 2'-fluorouridine-3'-phosphate
  modified_base 15: mod_base = OTHER; note = 2'-O-methyluridine-3'-phosphate
  modified_base 16: mod_base = OTHER; note = 2'-fluoroguanosine-3'-phosphate
  modified_base 17: mod_base = OTHER; note = 2'-O-methylcytidine-3'-phosphate
  modified_base 18: mod_base = OTHER; note = 2'-O-methyladenosine-3'-phosphate
  modified_base 19: mod_base = OTHER; note = 2'-O-methylguanosine-3'-phosphate
  modified_base 20: mod_base = OTHER; note = 2'-O-methyladenosine-3'-phosphate
  modified_base 21: mod_base = OTHER; note = 2'-O-methylcytidine-3'-phosphorothioate
  modified_base 22: mod_base = OTHER; note = 2'-O-methyladenosine-3'-phosphorothioate
  modified_base 23: mod_base = OTHER; note = 2'-O-methyluridine-3'-phosphate
acgcttctggtttttgcagacat

SEQ ID NO: 324 - DNA, 23 bp, synthetic construct
  misc_feature 1..23: note = Description of Artificial Sequence: Synthetic oligonucleotide
  source 1..23: mol_type = other DNA
  modified_base 1: mod_base = OTHER; note = 2'-O-methyladenosine-3'-phosphorothioate
  modified_base 2: mod_base = OTHER; note = 2'-fluorocytidine-3'-phosphorothioate
  modified_base 3: mod_base = OTHER; note = 2'-O-methyluridine-3'-phosphate
  modified_base 4: mod_base = OTHER; note = 2'-O-methylcytidine-3'-phosphate
  modified_base 5: mod_base = OTHER; note = 2'-O-methylcytidine-3'-phosphate
  modified_base 6: mod_base = OTHER; note = 2'-O-methylguanosine-3'-phosphate
  modified_base 7: mod_base = OTHER; note = Thymidine-glycol nucleic acid (GNA) S-Isomer
  modified_base 8: mod_base = OTHER; note = 2'-O-methyluridine-3'-phosphate
  modified_base 9: mod_base = OTHER; note = 2'-O-methylguanosine-3'-phosphate
  modified_base 10: mod_base = OTHER; note = 2'-O-methyluridine-3'-phosphate
  modified_base 11: mod_base = OTHER; note = 2'-O-methylcytidine-3'-phosphate
  modified_base 12: mod_base = OTHER; note = 2'-O-methyladenosine-3'-phosphate
  modified_base 13: mod_base = OTHER; note = 2'-O-methylcytidine-3'-phosphate
  modified_base 14: mod_base = OTHER; note = 2'-fluoroadenosine-3'-phosphate
  modified_base 15: mod_base = OTHER; note = 2'-O-methylguanosine-3'-phosphate
  modified_base 16: mod_base = OTHER; note = 2'-fluoroadenosine-3'-phosphate
  modified_base 17: mod_base = OTHER; note = 2'-O-methyluridine-3'-phosphate
  modified_base 18: mod_base = OTHER; note = 2'-O-methylcytidine-3'-phosphate
  modified_base 19: mod_base = OTHER; note = 2'-O-methylguanosine-3'-phosphate
  modified_base 20: mod_base = OTHER; note = 2'-O-methylcytidine-3'-phosphate
  modified_base 21: mod_base = OTHER; note = 2'-O-methyluridine-3'-phosphorothioate
  modified_base 22: mod_base = OTHER; note = 2'-O-methylguanosine-3'-phosphorothioate
  modified_base 23: mod_base = OTHER; note = 2'-O-methyluridine-3'-phosphate
  misc_feature 1..6: note = RNA
  misc_feature 7: note = DNA
  misc_feature 8..23: note = RNA
actccgttgtcacagatcgctgt

SEQ ID NO: 325 - RNA, 23 nt, synthetic construct
  misc_feature 1..23: note = Description of Artificial Sequence: Synthetic oligonucleotide
  source 1..23: mol_type = other RNA
  modified_base 1: mod_base = OTHER; note = 2'-O-methyladenosine-3'-phosphorothioate
  modified_base 2: mod_base = OTHER; note = 2'-fluoroadenosine-3'-phosphorothioate
  modified_base 3: mod_base = OTHER; note = 2'-O-methyluridine-3'-phosphate
  modified_base 4: mod_base = OTHER; note = 2'-O-methylguanosine-3'-phosphate
  modified_base 5: mod_base = OTHER; note = 2'-O-methyluridine-3'-phosphate
  modified_base 6: mod_base = OTHER; note = 2'-O-methyladenosine-3'-phosphate
  modified_base 7: mod_base = OTHER; note = Guanosine-glycol nucleic acid (GNA)
  modified_base 8: mod_base = OTHER; note = 2'-O-methyladenosine-3'-phosphate
  modified_base 9: mod_base = OTHER; note = 2'-O-methylcytidine-3'-phosphate
  modified_base 10: mod_base = OTHER; note = 2'-O-methylcytidine-3'-phosphate
  modified_base 11: mod_base = OTHER; note = 2'-O-methyluridine-3'-phosphate
  modified_base 12: mod_base = OTHER; note = 2'-O-methylcytidine-3'-phosphate
  modified_base 13: mod_base = OTHER; note = 2'-O-methylcytidine-3'-phosphate
  modified_base 14: mod_base = OTHER; note = 2'-fluorouridine-3'-phosphate
  modified_base 15: mod_base = OTHER; note = 2'-O-methyluridine-3'-phosphate
  modified_base 16: mod_base = OTHER; note = 2'-fluorocytidine-3'-phosphate
  modified_base 17: mod_base = OTHER; note = 2'-O-methylcytidine-3'-phosphate
  modified_base 18: mod_base = OTHER; note = 2'-O-methylguanosine-3'-phosphate
  modified_base 19: mod_base = OTHER; note = 2'-O-methyladenosine-3'-phosphate
  modified_base 20: mod_base = OTHER; note = 2'-O-methylguanosine-3'-phosphate
  modified_base 21: mod_base = OTHER; note = 2'-O-methyluridine-3'-phosphorothioate
  modified_base 22: mod_base = OTHER; note = 2'-O-methylcytidine-3'-phosphorothioate
  modified_base 23: mod_base = OTHER; note = 2'-O-methyladenosine-3'-phosphate
aatgtagacctccttccgagtca

SEQ ID NO: 326 - RNA, 23 nt, synthetic construct
  misc_feature 1..23: note = Description of Artificial Sequence: Synthetic oligonucleotide
  source 1..23: mol_type = other RNA
  modified_base 1: mod_base = OTHER; note = 2'-O-methyladenosine-3'-phosphorothioate
  modified_base 2: mod_base = OTHER; note = 2'-fluoroguanosine-3'-phosphorothioate
  modified_base 3: mod_base = OTHER; note = 2'-O-methyluridine-3'-phosphate
  modified_base 4: mod_base = OTHER; note = 2'-O-methylguanosine-3'-phosphate
  modified_base 5: mod_base = OTHER; note = 2'-O-methyluridine-3'-phosphate
  modified_base 6: mod_base = OTHER; note = 2'-O-methylcytidine-3'-phosphate
  modified_base 7: mod_base = OTHER; note = Guanosine-glycol nucleic acid (GNA)
  modified_base 8: mod_base = OTHER; note = 2'-O-methyluridine-3'-phosphate
  modified_base 9: mod_base = OTHER; note = 2'-O-methyladenosine-3'-phosphate
  modified_base 10: mod_base = OTHER; note = 2'-O-methylcytidine-3'-phosphate
  modified_base 11: mod_base = OTHER; note = 2'-O-methyladenosine-3'-phosphate
  modified_base 12: mod_base = OTHER; note = 2'-O-methyluridine-3'-phosphate
  modified_base 13: mod_base = OTHER; note = 2'-O-methylguanosine-3'-phosphate
  modified_base 14: mod_base = OTHER; note = 2'-fluoroadenosine-3'-phosphate
  modified_base 15: mod_base = OTHER; note = 2'-O-methyladenosine-3'-phosphate
  modified_base 16: mod_base = OTHER; note = 2'-fluoroguanosine-3'-phosphate
  modified_base 17: mod_base = OTHER; note = 2'-O-methylguanosine-3'-phosphate
  modified_base 18: mod_base = OTHER; note = 2'-O-methyladenosine-3'-phosphate
  modified_base 19: mod_base = OTHER; note = 2'-O-methylguanosine-3'-phosphate
  modified_base 20: mod_base = OTHER; note = 2'-O-methyluridine-3'-phosphate
  modified_base 21: mod_base = OTHER; note = 2'-O-methylcytidine-3'-phosphorothioate
  modified_base 22: mod_base = OTHER; note = 2'-O-methyluridine-3'-phosphorothioate
  modified_base 23: mod_base = OTHER; note = 2'-O-methyluridine-3'-phosphate
agtgtcgtacatgaaggagtctt

SEQ ID NO: 327 - DNA, 23 bp, synthetic construct
  misc_feature 1..23: note = Description of Artificial Sequence: Synthetic oligonucleotide
  source 1..23: mol_type = other DNA
  modified_base 1: mod_base = OTHER; note = 2'-O-methyladenosine-3'-phosphorothioate
  modified_base 2: mod_base = OTHER; note = 2'-fluorocytidine-3'-phosphorothioate
  modified_base 3: mod_base = OTHER; note = 2'-O-methylcytidine-3'-phosphate
  modified_base 4: mod_base = OTHER; note = 2'-O-methyladenosine-3'-phosphate
  modified_base 5: mod_base = OTHER; note = 2'-O-methyladenosine-3'-phosphate
  modified_base 6: mod_base = OTHER; note = 2'-O-methylcytidine-3'-phosphate
  modified_base 7: mod_base = OTHER; note = Thymidine-glycol nucleic acid (GNA) S-Isomer
  modified_base 8: mod_base = OTHER; note = 2'-O-methyluridine-3'-phosphate
  modified_base 9: mod_base = OTHER; note = 2'-O-methylguanosine-3'-phosphate
  modified_base 10: mod_base = OTHER; note = 2'-O-methyladenosine-3'-phosphate
  modified_base 11: mod_base = OTHER; note = 2'-O-methyladenosine-3'-phosphate
  modified_base 12: mod_base = OTHER; note = 2'-O-methyluridine-3'-phosphate
  modified_base 13: mod_base = OTHER; note = 2'-O-methylguanosine-3'-phosphate
  modified_base 14: mod_base = OTHER; note = 2'-fluoroadenosine-3'-phosphate
  modified_base 15: mod_base = OTHER; note = 2'-O-methyladenosine-3'-phosphate
  modified_base 16: mod_base = OTHER; note = 2'-fluoroadenosine-3'-phosphate
  modified_base 17: mod_base = OTHER; note = 2'-O-methylcytidine-3'-phosphate
  modified_base 18: mod_base = OTHER; note = 2'-O-methylguanosine-3'-phosphate
  modified_base 19: mod_base = OTHER; note = 2'-O-methyladenosine-3'-phosphate
  modified_base 20: mod_base = OTHER; note = 2'-O-methylcytidine-3'-phosphate
  modified_base 21: mod_base = OTHER; note = 2'-O-methyluridine-3'-phosphorothioate
  modified_base 22: mod_base = OTHER; note = 2'-O-methyluridine-3'-phosphorothioate
  modified_base 23: mod_base = OTHER; note = 2'-O-methylcytidine-3'-phosphate
  misc_feature 1..6: note = RNA
  misc_feature 7: note = DNA
  misc_feature 8..23: note = RNA
accaacttgaatgaaacgacttc

SEQ ID NO: 328 - RNA, 23 nt, synthetic construct
  misc_feature 1..23: note = Description of Artificial Sequence: Synthetic oligonucleotide
  source 1..23: mol_type = other RNA
  modified_base 1: mod_base = OTHER; note = 2'-O-methyladenosine-3'-phosphorothioate
  modified_base 2: mod_base = OTHER; note = 2'-fluoroguanosine-3'-phosphorothioate
  modified_base 3: mod_base = OTHER; note = 2'-O-methylguanosine-3'-phosphate
  modified_base 4: mod_base = OTHER; note = 2'-O-methyladenosine-3'-phosphate
  modified_base 5: mod_base = OTHER; note = 2'-O-methyladenosine-3'-phosphate
  modified_base 6: mod_base = OTHER; note = 2'-O-methylguanosine-3'-phosphate
  modified_base 7: mod_base = OTHER; note = Cytidine-glycol nucleic acid (GNA)
  modified_base 8: mod_base = OTHER; note = 2'-O-methylcytidine-3'-phosphate
  modified_base 9: mod_base = OTHER; note = 2'-O-methyluridine-3'-phosphate
  modified_base 10: mod_base = OTHER; note = 2'-O-methylcytidine-3'-phosphate
  modified_base 11: mod_base = OTHER; note = 2'-O-methyladenosine-3'-phosphate
  modified_base 12: mod_base = OTHER; note = 2'-O-methyladenosine-3'-phosphate
  modified_base 13: mod_base = OTHER; note = 2'-O-methyladenosine-3'-phosphate
  modified_base 14: mod_base = OTHER; note = 2'-fluoroguanosine-3'-phosphate
  modified_base 15: mod_base = OTHER; note = 2'-O-methylcytidine-3'-phosphate
  modified_base 16: mod_base = OTHER; note = 2'-fluorouridine-3'-phosphate
  modified_base 17: mod_base = OTHER; note = 2'-O-methylcytidine-3'-phosphate
  modified_base 18: mod_base = OTHER; note = 2'-O-methylguanosine-3'-phosphate
  modified_base 19: mod_base = OTHER; note = 2'-O-methyladenosine-3'-phosphate
  modified_base 20: mod_base = OTHER; note = 2'-O-methylguanosine-3'-phosphate
  modified_base 21: mod_base = OTHER; note = 2'-O-methyluridine-3'-phosphorothioate
  modified_base 22: mod_base = OTHER; note = 2'-O-methyluridine-3'-phosphorothioate
  modified_base 23: mod_base = OTHER; note = 2'-O-methylguanosine-3'-phosphate
aggaagcctcaaagctcgagttg

SEQ ID NO: 329 - RNA, 23 nt, synthetic construct
  misc_feature 1..23: note = Description of Artificial Sequence: Synthetic oligonucleotide
  source 1..23: mol_type = other RNA
  modified_base 1: mod_base = OTHER; note = 2'-O-methyladenosine-3'-phosphorothioate
  modified_base 2: mod_base = OTHER; note = 2'-fluorocytidine-3'-phosphorothioate
  modified_base 3: mod_base = OTHER; note = 2'-O-methylcytidine-3'-phosphate
  modified_base 4: mod_base = OTHER; note = 2'-O-methyluridine-3'-phosphate
  modified_base 5: mod_base = OTHER; note = 2'-O-methylcytidine-3'-phosphate
  modified_base 6: mod_base = OTHER; note = 2'-O-methyladenosine-3'-phosphate
  modified_base 7: mod_base = OTHER; note = Adenosine-glycol nucleic acid (GNA)
  modified_base 8: mod_base = OTHER; note = 2'-O-methyladenosine-3'-phosphate
  modified_base 9: mod_base = OTHER; note = 2'-O-methylguanosine-3'-phosphate
  modified_base 10: mod_base = OTHER; note = 2'-O-methylcytidine-3'-phosphate
  modified_base 11: mod_base = OTHER; note = 2'-O-methyluridine-3'-phosphate
  modified_base 12: mod_base = OTHER; note = 2'-O-methylcytidine-3'-phosphate
  modified_base 13: mod_base = OTHER; note = 2'-O-methylguanosine-3'-phosphate
  modified_base 14: mod_base = OTHER; note = 2'-fluoroadenosine-3'-phosphate
  modified_base 15: mod_base = OTHER; note = 2'-O-methylguanosine-3'-phosphate
  modified_base 16: mod_base = OTHER; note = 2'-fluorouridine-3'-phosphate
  modified_base 17: mod_base = OTHER; note = 2'-O-methyluridine-3'-phosphate
  modified_base 18: mod_base = OTHER; note = 2'-O-methylguanosine-3'-phosphate
  modified_base 19: mod_base = OTHER; note = 2'-O-methyluridine-3'-phosphate
  modified_base 20: mod_base = OTHER; note = 2'-O-methyluridine-3'-phosphate
  modified_base 21: mod_base = OTHER; note = 2'-O-methylcytidine-3'-phosphorothioate
  modified_base 22: mod_base = OTHER; note = 2'-O-methylcytidine-3'-phosphorothioate
  modified_base 23: mod_base = OTHER; note = 2'-O-methylcytidine-3'-phosphate
acctcaaagctcgagttgttccc

SEQ ID NO: 330 - RNA, 23 nt, synthetic construct
  misc_feature 1..23: note = Description of Artificial Sequence: Synthetic oligonucleotide
  source 1..23: mol_type = other RNA
  modified_base 1: mod_base = OTHER; note = 2'-O-methyladenosine-3'-phosphorothioate
  modified_base 2: mod_base = OTHER; note = 2'-fluoroguanosine-3'-phosphorothioate
  modified_base 3: mod_base = OTHER; note = 2'-O-methyluridine-3'-phosphate
  modified_base 4: mod_base = OTHER; note = 2'-O-methylcytidine-3'-phosphate
  modified_base 5: mod_base = OTHER; note = 2'-O-methyluridine-3'-phosphate
  modified_base 6: mod_base = OTHER; note = 2'-O-methylguanosine-3'-phosphate
  modified_base 7: mod_base = OTHER; note = Adenosine-glycol nucleic acid (GNA)
  modified_base 8: mod_base = OTHER; note = 2'-O-methyluridine-3'-phosphate
  modified_base 9: mod_base = OTHER; note = 2'-O-methylcytidine-3'-phosphate
  modified_base 10: mod_base = OTHER; note = 2'-O-methylcytidine-3'-phosphate
  modified_base 11: mod_base = OTHER; note = 2'-O-methyladenosine-3'-phosphate
  modified_base 12: mod_base = OTHER; note = 2'-O-methyluridine-3'-phosphate
  modified_base 13: mod_base = OTHER; note = 2'-O-methylcytidine-3'-phosphate
  modified_base 14: mod_base = OTHER; note = 2'-fluorouridine-3'-phosphate
  modified_base 15: mod_base = OTHER; note = 2'-O-methyladenosine-3'-phosphate
  modified_base 16: mod_base = OTHER; note = 2'-fluoroguanosine-3'-phosphate
  modified_base 17: mod_base = OTHER; note = 2'-O-methylcytidine-3'-phosphate
  modified_base 18: mod_base = OTHER; note = 2'-O-methyladenosine-3'-phosphate
  modified_base 19: mod_base = OTHER; note = 2'-O-methylcytidine-3'-phosphate
  modified_base 20: mod_base = OTHER; note = 2'-O-methylcytidine-3'-phosphate
  modified_base 21: mod_base = OTHER; note = 2'-O-methyladenosine-3'-phosphorothioate
  modified_base 22: mod_base = OTHER; note = 2'-O-methylguanosine-3'-phosphorothioate
  modified_base 23: mod_base = OTHER; note = 2'-O-methylguanosine-3'-phosphate
agtctgatccatctagcaccagg

SEQ ID NO: 331 - RNA, 23 nt, synthetic construct
  misc_feature 1..23: note = Description of Artificial Sequence: Synthetic oligonucleotide
  source 1..23: mol_type = other RNA
  modified_base 1: mod_base = OTHER; note = 2'-O-methyladenosine-3'-phosphorothioate
  modified_base 2: mod_base = OTHER; note = 2'-fluoroadenosine-3'-phosphorothioate
  modified_base 3: mod_base = OTHER; note = 2'-O-methyladenosine-3'-phosphate
  modified_base 4: mod_base = OTHER; note = 2'-O-methylguanosine-3'-phosphate
  modified_base 5: mod_base = OTHER; note = 2'-O-methyladenosine-3'-phosphate
  modified_base 6: mod_base = OTHER; note = 2'-O-methylguanosine-3'-phosphate
  modified_base 7: mod_base = OTHER; note = Cytidine-glycol nucleic acid (GNA)
  modified_base 8: mod_base = OTHER; note = 2'-O-methylcytidine-3'-phosphate
  modified_base 9: mod_base = OTHER; note = 2'-O-methyladenosine-3'-phosphate
  modified_base 10: mod_base = OTHER; note = 2'-O-methylcytidine-3'-phosphate
  modified_base 11: mod_base = OTHER; note = 2'-O-methylcytidine-3'-phosphate
  modified_base 12: mod_base = OTHER; note = 2'-O-methyluridine-3'-phosphate
  modified_base 13: mod_base = OTHER; note = 2'-O-methyluridine-3'-phosphate
  modified_base 14: mod_base = OTHER; note = 2'-fluorocytidine-3'-phosphate
  modified_base 15: mod_base = OTHER; note = 2'-O-methylcytidine-3'-phosphate
  modified_base 16: mod_base = OTHER; note = 2'-fluorouridine-3'-phosphate
  modified_base 17: mod_base = OTHER; note = 2'-O-methylguanosine-3'-phosphate
  modified_base 18: mod_base = OTHER; note = 2'-O-methyladenosine-3'-phosphate
  modified_base 19: mod_base = OTHER; note = 2'-O-methylcytidine-3'-phosphate
  modified_base 20: mod_base = OTHER; note = 2'-O-methyladenosine-3'-phosphate
  modified_base 21: mod_base = OTHER; note = 2'-O-methylcytidine-3'-phosphorothioate
  modified_base 22: mod_base = OTHER; note = 2'-O-methylguanosine-3'-phosphorothioate
  modified_base 23: mod_base = OTHER; note = 2'-O-methyluridine-3'-phosphate
aaagagccaccttcctgacacgt

SEQ ID NO: 332 - DNA, 23 bp, synthetic construct
  misc_feature 1..23: note = Description of Artificial Sequence: Synthetic oligonucleotide
  source 1..23: mol_type = other DNA
  modified_base 1: mod_base = OTHER; note = 2'-O-methyladenosine-3'-phosphorothioate
  modified_base 2: mod_base = OTHER; note = 2'-fluorocytidine-3'-phosphorothioate
  modified_base 3: mod_base = OTHER; note = 2'-O-methyladenosine-3'-phosphate
  modified_base 4: mod_base = OTHER; note = 2'-O-methyluridine-3'-phosphate
  modified_base 5: mod_base = OTHER; note = 2'-O-methylguanosine-3'-phosphate
  modified_base 6: mod_base = OTHER; note = 2'-O-methyluridine-3'-phosphate
  modified_base 7: mod_base = OTHER; note = Thymidine-glycol nucleic acid (GNA) S-Isomer
  modified_base 8: mod_base = OTHER; note = 2'-O-methylguanosine-3'-phosphate
  modified_base 9: mod_base = OTHER; note = 2'-O-methyluridine-3'-phosphate
  modified_base 10: mod_base = OTHER; note = 2'-O-methylguanosine-3'-phosphate
  modified_base 11: mod_base = OTHER; note = 2'-O-methylcytidine-3'-phosphate
  modified_base 12: mod_base = OTHER; note = 2'-O-methyladenosine-3'-phosphate
  modified_base 13: mod_base = OTHER; note = 2'-O-methyladenosine-3'-phosphate
  modified_base 14: mod_base = OTHER; note = 2'-fluorouridine-3'-phosphate
  modified_base 15: mod_base = OTHER; note = 2'-O-methylcytidine-3'-phosphate
  modified_base 16: mod_base = OTHER; note = 2'-fluorocytidine-3'-phosphate
  modified_base 17: mod_base = OTHER; note = 2'-O-methyladenosine-3'-phosphate
  modified_base 18: mod_base = OTHER; note = 2'-O-methyluridine-3'-phosphate
  modified_base 19: mod_base = OTHER; note = 2'-O-methylcytidine-3'-phosphate
  modified_base 20: mod_base = OTHER; note = 2'-O-methyladenosine-3'-phosphate
  modified_base 21: mod_base = OTHER; note = 2'-O-methylguanosine-3'-phosphorothioate
  modified_base 22: mod_base = OTHER; note = 2'-O-methyluridine-3'-phosphorothioate
  modified_base 23: mod_base = OTHER; note = 2'-O-methylcytidine-3'-phosphate
  misc_feature 1..6: note = RNA
  misc_feature 7: note = DNA
  misc_feature 8..23: note = RNA
acatgttgtgcaatccatcagtc

SEQ ID NO: 333 - RNA, 23 nt, synthetic construct
  misc_feature 1..23: note = Description of Artificial Sequence: Synthetic oligonucleotide
  source 1..23: mol_type = other RNA
  modified_base 1: mod_base = OTHER; note = 2'-O-methyladenosine-3'-phosphorothioate
  modified_base 2: mod_base = OTHER; note = 2'-fluorocytidine-3'-phosphorothioate
  modified_base 3: mod_base = OTHER; note = 2'-O-methyladenosine-3'-phosphate
  modified_base 4: mod_base = OTHER; note = 2'-O-methyladenosine-3'-phosphate
  modified_base 5: mod_base = OTHER; note = 2'-O-methyladenosine-3'-phosphate
  modified_base 6: mod_base = OTHER; note = 2'-O-methyluridine-3'-phosphate
  modified_base 7: mod_base = OTHER; note = Guanosine-glycol nucleic acid (GNA)
  modified_base 8: mod_base = OTHER; note = 2'-O-methylguanosine-3'-phosphate
  modified_base 9: mod_base = OTHER; note = 2'-O-methylguanosine-3'-phosphate
  modified_base 10: mod_base = OTHER; note = 2'-O-methylcytidine-3'-phosphate
  modified_base 11: mod_base = OTHER; note = 2'-O-methylcytidine-3'-phosphate
  modified_base 12: mod_base = OTHER; note = 2'-O-methyluridine-3'-phosphate
  modified_base 13: mod_base = OTHER; note = 2'-O-methylguanosine-3'-phosphate
  modified_base 14: mod_base = OTHER; note = 2'-fluoroadenosine-3'-phosphate
  modified_base 15: mod_base = OTHER; note = 2'-O-methyluridine-3'-phosphate
  modified_base 16: mod_base = OTHER; note = 2'-fluoroadenosine-3'-phosphate
  modified_base 17: mod_base = OTHER; note = 2'-O-methylguanosine-3'-phosphate
  modified_base 18: mod_base = OTHER; note = 2'-O-methyluridine-3'-phosphate
  modified_base 19: mod_base = OTHER; note = 2'-O-methylcytidine-3'-phosphate
  modified_base 20: mod_base = OTHER; note = 2'-O-methyluridine-3'-phosphate
  modified_base 21: mod_base = OTHER; note = 2'-O-methylguanosine-3'-phosphorothioate
  modified_base 22: mod_base = OTHER; note = 2'-O-methylguanosine-3'-phosphorothioate
  modified_base 23: mod_base = OTHER; note = 2'-O-methylcytidine-3'-phosphate
acaaatgggcctgatagtctggc

SEQ ID NO: 334 - RNA, 23 nt, synthetic construct
  misc_feature 1..23: note = Description of Artificial Sequence: Synthetic oligonucleotide
  source 1..23: mol_type = other RNA
  modified_base 1: mod_base = OTHER; note = 2'-O-methyladenosine-3'-phosphorothioate
  modified_base 2: mod_base = OTHER; note = 2'-fluorocytidine-3'-phosphorothioate
  modified_base 3: mod_base = OTHER; note = 2'-O-methyladenosine-3'-phosphate
  modified_base 4: mod_base = OTHER; note = 2'-O-methyluridine-3'-phosphate
  modified_base 5: mod_base = OTHER; note = 2'-O-methylcytidine-3'-phosphate
  modified_base 6: mod_base = OTHER; note = 2'-O-methylguanosine-3'-phosphate
  modified_base 7: mod_base = OTHER; note = Adenosine-glycol nucleic acid (GNA)
  modified_base 8: mod_base = OTHER; note = 2'-O-methylcytidine-3'-phosphate
  modified_base 9: mod_base = OTHER; note = 2'-O-methyluridine-3'-phosphate
  modified_base 10: mod_base = OTHER; note = 2'-O-methylcytidine-3'-phosphate
  modified_base 11: mod_base = OTHER; note = 2'-O-methylcytidine-3'-phosphate
  modified_base 12: mod_base = OTHER; note = 2'-O-methyluridine-3'-phosphate
  modified_base 13: mod_base = OTHER; note = 2'-O-methyluridine-3'-phosphate
  modified_base 14: mod_base = OTHER; note = 2'-fluorocytidine-3'-phosphate
  modified_base 15: mod_base = OTHER; note = 2'-O-methyluridine-3'-phosphate
  modified_base 16: mod_base = OTHER; note = 2'-fluoroadenosine-3'-phosphate
  modified_base 17: mod_base = OTHER; note = 2'-O-methyluridine-3'-phosphate
  modified_base 18: mod_base = OTHER; note = 2'-O-methylguanosine-3'-phosphate
  modified_base 19: mod_base = OTHER; note = 2'-O-methylguanosine-3'-phosphate
  modified_base 20: mod_base = OTHER; note = 2'-O-methyluridine-3'-phosphate
  modified_base 21: mod_base = OTHER; note = 2'-O-methylcytidine-3'-phosphorothioate
  modified_base 22: mod_base = OTHER; note = 2'-O-methyluridine-3'-phosphorothioate
  modified_base 23: mod_base = OTHER; note = 2'-O-methylcytidine-3'-phosphate
acatcgactccttctatggtctc

SEQ ID NO: 335 - RNA, 23 nt, synthetic construct
  misc_feature 1..23: note = Description of Artificial Sequence: Synthetic oligonucleotide
  source 1..23: mol_type = other RNA
  modified_base 1: mod_base = OTHER; note = 2'-O-methyladenosine-3'-phosphorothioate
  modified_base 2: mod_base = OTHER; note = 2'-fluorocytidine-3'-phosphorothioate
  modified_base 3: mod_base = OTHER; note = 2'-O-methyluridine-3'-phosphate
  modified_base 4: mod_base = OTHER; note = 2'-O-methyladenosine-3'-phosphate
  modified_base 5: mod_base = OTHER; note = 2'-O-methylguanosine-3'-phosphate
  modified_base 6: mod_base = OTHER; note = 2'-O-methyladenosine-3'-phosphate
  modified_base 7: mod_base = OTHER; note = Cytidine-glycol nucleic acid (GNA)
  modified_base 8: mod_base = OTHER; note = 2'-O-methyladenosine-3'-phosphate
  modified_base 9: mod_base = OTHER; note = 2'-O-methylcytidine-3'-phosphate
  modified_base 10: mod_base = OTHER; note = 2'-O-methyluridine-3'-phosphate
  modified_base 11: mod_base = OTHER; note = 2'-O-methyluridine-3'-phosphate
  modified_base 12: mod_base = OTHER; note = 2'-O-methyluridine-3'-phosphate
  modified_base 13: mod_base = OTHER; note = 2'-O-methyluridine-3'-phosphate
  modified_base 14: mod_base = OTHER; note = 2'-fluorouridine-3'-phosphate
  modified_base 15: mod_base = OTHER; note = 2'-O-methylguanosine-3'-phosphate
  modified_base 16: mod_base = OTHER; note = 2'-fluoroguanosine-3'-phosphate
  modified_base 17: mod_base = OTHER; note = 2'-O-methylcytidine-3'-phosphate
  modified_base 18: mod_base = OTHER; note = 2'-O-methyluridine-3'-phosphate
  modified_base 19: mod_base = OTHER; note = 2'-O-methylcytidine-3'-phosphate
  modified_base 20: mod_base = OTHER; note = 2'-O-methylcytidine-3'-phosphate
  modified_base 21: mod_base = OTHER; note = 2'-O-methyluridine-3'-phosphorothioate
  modified_base 22: mod_base = OTHER; note = 2'-O-methylguanosine-3'-phosphorothioate
  modified_base 23: mod_base = OTHER; note = 2'-O-methyluridine-3'-phosphate
actagacactttttggctcctgt

SEQ ID NO: 336 - RNA, 23 nt, synthetic construct
  misc_feature 1..23: note = Description of Artificial Sequence: Synthetic oligonucleotide
  source 1..23: mol_type = other RNA
  modified_base 1: mod_base = OTHER; note = 2'-O-methyladenosine-3'-phosphorothioate
  modified_base 2: mod_base = OTHER; note = 2'-fluoroadenosine-3'-phosphorothioate
  modified_base 3: mod_base = OTHER; note = 2'-O-methyluridine-3'-phosphate
  modified_base 4: mod_base = OTHER; note = 2'-O-methylcytidine-3'-phosphate
  modified_base 5: mod_base = OTHER; note = 2'-O-methylguanosine-3'-phosphate
  modified_base 6: mod_base = OTHER; note = 2'-O-methyladenosine-3'-phosphate
  modified_base 7: mod_base = OTHER; note = Cytidine-glycol nucleic acid (GNA)
  modified_base 8: mod_base = OTHER; note = 2'-O-methyluridine-3'-phosphate
  modified_base 9: mod_base = OTHER; note = 2'-O-methylcytidine-3'-phosphate
  modified_base 10: mod_base = OTHER; note = 2'-O-methylcytidine-3'-phosphate
  modified_base 11: mod_base = OTHER; note = 2'-O-methyluridine-3'-phosphate
  modified_base 12: mod_base = OTHER; note = 2'-O-methyluridine-3'-phosphate
  modified_base 13: mod_base = OTHER; note = 2'-O-methylcytidine-3'-phosphate
  modified_base 14: mod_base = OTHER; note = 2'-fluorouridine-3'-phosphate
  modified_base 15: mod_base = OTHER; note = 2'-O-methyladenosine-3'-phosphate
  modified_base 16: mod_base = OTHER; note = 2'-fluorouridine-3'-phosphate
  modified_base 17: mod_base = OTHER; note = 2'-O-methylguanosine-3'-phosphate
  modified_base 18: mod_base = OTHER; note = 2'-O-methylguanosine-3'-phosphate
  modified_base 19: mod_base = OTHER; note = 2'-O-methyluridine-3'-phosphate
  modified_base 20: mod_base = OTHER; note = 2'-O-methylcytidine-3'-phosphate
  modified_base 21: mod_base = OTHER; note = 2'-O-methyluridine-3'-phosphorothioate
  modified_base 22: mod_base = OTHER; note = 2'-O-methylcytidine-3'-phosphorothioate
  modified_base 23: mod_base = OTHER; note = 2'-O-methyluridine-3'-phosphate
aatcgactccttctatggtctct

SEQ ID NO: 337 - RNA, 23 nt, synthetic construct
  misc_feature 1..23: note = Description of Artificial Sequence: Synthetic oligonucleotide
  source 1..23: mol_type = other RNA
  modified_base 1: mod_base = OTHER; note = 2'-O-methyladenosine-3'-phosphorothioate
  modified_base 2: mod_base = OTHER; note = 2'-fluorouridine -3'-phosphorothioate
  modified_base 3: mod_base = OTHER; note = 2'-O-methyluridine-3'-phosphate
  modified_base 4: mod_base = OTHER; note = 2'-O-methyladenosine-3'-phosphate
  modified_base 5: mod_base = OTHER; note = 2'-O-methylguanosine-3'-phosphate
  modified_base 6: mod_base = OTHER; note = 2'-O-methyluridine-3'-phosphate
  modified_base 7: mod_base = OTHER; note = Cytidine-glycol nucleic acid (GNA)
  modified_base 8: mod_base = OTHER; note = 2'-O-methylcytidine-3'-phosphate
  modified_base 9: mod_base = OTHER; note = 2'-O-methylcytidine-3'-phosphate
  modified_base 10: mod_base = OTHER; note = 2'-O-methyluridine-3'-phosphate
  modified_base 11: mod_base = OTHER; note = 2'-O-methylguanosine-3'-phosphate
  modified_base 12: mod_base = OTHER; note = 2'-O-methyladenosine-3'-phosphate
  modified_base 13: mod_base = OTHER; note = 2'-O-methylcytidine-3'-phosphate
  modified_base 14: mod_base = OTHER; note = 2'-fluorouridine-3'-phosphate
  modified_base 15: mod_base = OTHER; note = 2'-O-methyluridine-3'-phosphate
  modified_base 16: mod_base = OTHER; note = 2'-fluorocytidine-3'-phosphate
  modified_base 17: mod_base = OTHER; note = 2'-O-methyladenosine-3'-phosphate
  modified_base 18: mod_base = OTHER; note = 2'-O-methyladenosine-3'-phosphate
  modified_base 19: mod_base = OTHER; note = 2'-O-methylcytidine-3'-phosphate
  modified_base 20: mod_base = OTHER; note = 2'-O-methyluridine-3'-phosphate
  modified_base 21: mod_base = OTHER; note = 2'-O-methyluridine-3'-phosphorothioate
  modified_base 22: mod_base = OTHER; note = 2'-O-methylguanosine-3'-phosphorothioate
  modified_base 23: mod_base = OTHER; note = 2'-O-methyluridine-3'-phosphate
attagtccctgacttcaacttgt

SEQ ID NO: 338 - RNA, 23 nt, synthetic construct
  misc_feature 1..23: note = Description of Artificial Sequence: Synthetic oligonucleotide
  source 1..23: mol_type = other RNA
  modified_base 1: mod_base = OTHER; note = 2'-O-methyladenosine-3'-phosphorothioate
  modified_base 2: mod_base = OTHER; note = 2'-fluorouridine -3'-phosphorothioate
  modified_base 3: mod_base = OTHER; note = 2'-O-methylguanosine-3'-phosphate
  modified_base 4: mod_base = OTHER; note = 2'-O-methylguanosine-3'-phosphate
  modified_base 5: mod_base = OTHER; note = 2'-O-methyladenosine-3'-phosphate
  modified_base 6: mod_base = OTHER; note = 2'-O-methylguanosine-3'-phosphate
  modified_base 7: mod_base = OTHER; note = Guanosine-glycol nucleic acid (GNA)
  modified_base 8: mod_base = OTHER; note = 2'-O-methyladenosine-3'-phosphate
  modified_base 9: mod_base = OTHER; note = 2'-O-methyladenosine-3'-phosphate
  modified_base 10: mod_base = OTHER; note = 2'-O-methylguanosine-3'-phosphate
  modified_base 11: mod_base = OTHER; note = 2'-O-methylcytidine-3'-phosphate
  modified_base 12: mod_base = OTHER; note = 2'-O-methylcytidine-3'-phosphate
  modified_base 13: mod_base = OTHER; note = 2'-O-methyluridine-3'-phosphate
  modified_base 14: mod_base = OTHER; note = 2'-fluorocytidine-3'-phosphate
  modified_base 15: mod_base = OTHER; note = 2'-O-methyladenosine-3'-phosphate
  modified_base 16: mod_base = OTHER; note = 2'-fluoroadenosine-3'-phosphate
  modified_base 17: mod_base = OTHER; note = 2'-O-methyladenosine-3'-phosphate
  modified_base 18: mod_base = OTHER; note = 2'-O-methylguanosine-3'-phosphate
  modified_base 19: mod_base = OTHER; note = 2'-O-methylcytidine-3'-phosphate
  modified_base 20: mod_base = OTHER; note = 2'-O-methyluridine-3'-phosphate
  modified_base 21: mod_base = OTHER; note = 2'-O-methylcytidine-3'-phosphorothioate
  modified_base 22: mod_base = OTHER; note = 2'-O-methylguanosine-3'-phosphorothioate
  modified_base 23: mod_base = OTHER; note = 2'-O-methyladenosine-3'-phosphate
atggaggaagcctcaaagctcga

SEQ ID NO: 339 - RNA, 23 nt, synthetic construct
  misc_feature 1..23: note = Description of Artificial Sequence: Synthetic oligonucleotide
  source 1..23: mol_type = other RNA
  modified_base 1: mod_base = OTHER; note = 2'-O-methyladenosine-3'-phosphorothioate
  modified_base 2: mod_base = OTHER; note = 2'-fluorocytidine-3'-phosphorothioate
  modified_base 3: mod_base = OTHER; note = 2'-O-methyluridine-3'-phosphate
  modified_base 4: mod_base = OTHER; note = 2'-O-methyluridine-3'-phosphate
  modified_base 5: mod_base = OTHER; note = 2'-O-methylguanosine-3'-phosphate
  modified_base 6: mod_base = OTHER; note = 2'-O-methyluridine-3'-phosphate
  modified_base 7: mod_base = OTHER; note = Guanosine-glycol nucleic acid (GNA)
  modified_base 8: mod_base = OTHER; note = 2'-O-methylguanosine-3'-phosphate
  modified_base 9: mod_base = OTHER; note = 2'-O-methyluridine-3'-phosphate
  modified_base 10: mod_base = OTHER; note = 2'-O-methylcytidine-3'-phosphate
  modified_base 11: mod_base = OTHER; note = 2'-O-methyluridine-3'-phosphate
  modified_base 12: mod_base = OTHER; note = 2'-O-methyluridine-3'-phosphate
  modified_base 13: mod_base = OTHER; note = 2'-O-methylcytidine-3'-phosphate
  modified_base 14: mod_base = OTHER; note = 2'-fluoroadenosine-3'-phosphate
  modified_base 15: mod_base = OTHER; note = 2'-O-methyluridine-3'-phosphate
  modified_base 16: mod_base = OTHER; note = 2'-fluoroadenosine-3'-phosphate
  modified_base 17: mod_base = OTHER; note = 2'-O-methyladenosine-3'-phosphate
  modified_base 18: mod_base = OTHER; note = 2'-O-methyluridine-3'-phosphate
  modified_base 19: mod_base = OTHER; note = 2'-O-methyluridine-3'-phosphate
  modified_base 20: mod_base = OTHER; note = 2'-O-methylguanosine-3'-phosphate
  modified_base 21: mod_base = OTHER; note = 2'-O-methyladenosine-3'-phosphorothioate
  modified_base 22: mod_base = OTHER; note = 2'-O-methyluridine-3'-phosphorothioate
  modified_base 23: mod_base = OTHER; note = 2'-O-methyluridine-3'-phosphate
acttgtggtcttcataattgatt

SEQ ID NO: 340 - RNA, 23 nt, synthetic construct
  misc_feature 1..23: note = Description of Artificial Sequence: Synthetic oligonucleotide
  source 1..23: mol_type = other RNA
  modified_base 1: mod_base = OTHER; note = 2'-O-methyladenosine-3'-phosphorothioate
  modified_base 2: mod_base = OTHER; note = 2'-fluoroguanosine-3'-phosphorothioate
  modified_base 3: mod_base = OTHER; note = 2'-O-methyluridine-3'-phosphate
  modified_base 4: mod_base = OTHER; note = 2'-O-methylcytidine-3'-phosphate
  modified_base 5: mod_base = OTHER; note = 2'-O-methylguanosine-3'-phosphate
  modified_base 6: mod_base = OTHER; note = 2'-O-methyluridine-3'-phosphate
  modified_base 7: mod_base = OTHER; note = Adenosine-glycol nucleic acid (GNA)
  modified_base 8: mod_base = OTHER; note = 2'-O-methylcytidine-3'-phosphate
  modified_base 9: mod_base = OTHER; note = 2'-O-methyladenosine-3'-phosphate
  modified_base 10: mod_base = OTHER; note = 2'-O-methyluridine-3'-phosphate
  modified_base 11: mod_base = OTHER; note = 2'-O-methylguanosine-3'-phosphate
  modified_base 12: mod_base = OTHER; note = 2'-O-methyladenosine-3'-phosphate
  modified_base 13: mod_base = OTHER; note = 2'-O-methyladenosine-3'-phosphate
  modified_base 14: mod_base = OTHER; note = 2'-fluoroguanosine-3'-phosphate
  modified_base 15: mod_base = OTHER; note = 2'-O-methylguanosine-3'-phosphate
  modified_base 16: mod_base = OTHER; note = 2'-fluoroadenosine-3'-phosphate
  modified_base 17: mod_base = OTHER; note = 2'-O-methylguanosine-3'-phosphate
  modified_base 18: mod_base = OTHER; note = 2'-O-methyluridine-3'-phosphate
  modified_base 19: mod_base = OTHER; note = 2'-O-methylcytidine-3'-phosphate
  modified_base 20: mod_base = OTHER; note = 2'-O-methyluridine-3'-phosphate
  modified_base 21: mod_base = OTHER; note = 2'-O-methyluridine-3'-phosphorothioate
  modified_base 22: mod_base = OTHER; note = 2'-O-methylguanosine-3'-phosphorothioate
  modified_base 23: mod_base = OTHER; note = 2'-O-methylguanosine-3'-phosphate
agtcgtacatgaaggagtcttgg

SEQ ID NO: 341 - RNA, 23 nt, synthetic construct
  misc_feature 1..23: note = Description of Artificial Sequence: Synthetic oligonucleotide
  source 1..23: mol_type = other RNA
  modified_base 1: mod_base = OTHER; note = 2'-O-methyladenosine-3'-phosphorothioate
  modified_base 2: mod_base = OTHER; note = 2'-fluoroadenosine-3'-phosphorothioate
  modified_base 3: mod_base = OTHER; note = 2'-O-methylguanosine-3'-phosphate
  modified_base 4: mod_base = OTHER; note = 2'-O-methyluridine-3'-phosphate
  modified_base 5: mod_base = OTHER; note = 2'-O-methyluridine-3'-phosphate
  modified_base 6: mod_base = OTHER; note = 2'-O-methylguanosine-3'-phosphate
  modified_base 7: mod_base = OTHER; note = Guanosine-glycol nucleic acid (GNA)
  modified_base 8: mod_base = OTHER; note = 2'-O-methyladenosine-3'-phosphate
  modified_base 9: mod_base = OTHER; note = 2'-O-methylguanosine-3'-phosphate
  modified_base 10: mod_base = OTHER; note = 2'-O-methylguanosine-3'-phosphate
  modified_base 11: mod_base = OTHER; note = 2'-O-methyladenosine-3'-phosphate
  modified_base 12: mod_base = OTHER; note = 2'-O-methyladenosine-3'-phosphate
  modified_base 13: mod_base = OTHER; note = 2'-O-methylguanosine-3'-phosphate
  modified_base 14: mod_base = OTHER; note = 2'-fluorocytidine-3'-phosphate
  modified_base 15: mod_base = OTHER; note = 2'-O-methylcytidine-3'-phosphate
  modified_base 16: mod_base = OTHER; note = 2'-fluorouridine-3'-phosphate
  modified_base 17: mod_base = OTHER; note = 2'-O-methylcytidine-3'-phosphate
  modified_base 18: mod_base = OTHER; note = 2'-O-methyladenosine-3'-phosphate
  modified_base 19: mod_base = OTHER; note = 2'-O-methyladenosine-3'-phosphate
  modified_base 20: mod_base = OTHER; note = 2'-O-methyladenosine-3'-phosphate
  modified_base 21: mod_base = OTHER; note = 2'-O-methylguanosine-3'-phosphorothioate
  modified_base 22: mod_base = OTHER; note = 2'-O-methylcytidine-3'-phosphorothioate
  modified_base 23: mod_base = OTHER; note = 2'-O-methyluridine-3'-phosphate
aagttggaggaagcctcaaagct

SEQ ID NO: 342 - RNA, 23 nt, synthetic construct
  misc_feature 1..23: note = Description of Artificial Sequence: Synthetic oligonucleotide
  source 1..23: mol_type = other RNA
  modified_base 1: mod_base = OTHER; note = 2'-O-methyladenosine-3'-phosphorothioate
  modified_base 2: mod_base = OTHER; note = 2'-fluoroguanosine-3'-phosphorothioate
  modified_base 3: mod_base = OTHER; note = 2'-O-methyluridine-3'-phosphate
  modified_base 4: mod_base = OTHER; note = 2'-O-methylguanosine-3'-phosphate
  modified_base 5: mod_base = OTHER; note = 2'-O-methylguanosine-3'-phosphate
  modified_base 6: mod_base = OTHER; note = 2'-O-methyluridine-3'-phosphate
  modified_base 7: mod_base = OTHER; note = Adenosine-glycol nucleic acid (GNA)
  modified_base 8: mod_base = OTHER; note = 2'-O-methylguanosine-3'-phosphate
  modified_base 9: mod_base = OTHER; note = 2'-O-methyluridine-3'-phosphate
  modified_base 10: mod_base = OTHER; note = 2'-O-methyluridine-3'-phosphate
  modified_base 11: mod_base = OTHER; note = 2'-O-methylguanosine-3'-phosphate
  modified_base 12: mod_base = OTHER; note = 2'-O-methylguanosine-3'-phosphate
  modified_base 13: mod_base = OTHER; note = 2'-O-methyladenosine-3'-phosphate
  modified_base 14: mod_base = OTHER; note = 2'-fluoroguanosine-3'-phosphate
  modified_base 15: mod_base = OTHER; note = 2'-O-methylguanosine-3'-phosphate
  modified_base 16: mod_base = OTHER; note = 2'-fluoroadenosine-3'-phosphate
  modified_base 17: mod_base = OTHER; note = 2'-O-methyladenosine-3'-phosphate
  modified_base 18: mod_base = OTHER; note = 2'-O-methylguanosine-3'-phosphate
  modified_base 19: mod_base = OTHER; note = 2'-O-methylcytidine-3'-phosphate
  modified_base 20: mod_base = OTHER; note = 2'-O-methylcytidine-3'-phosphate
  modified_base 21: mod_base = OTHER; note = 2'-O-methyluridine-3'-phosphorothioate
  modified_base 22: mod_base = OTHER; note = 2'-O-methylcytidine-3'-phosphorothioate
  modified_base 23: mod_base = OTHER; note = 2'-O-methyladenosine-3'-phosphate
agtggtagttggaggaagcctca

SEQ ID NO: 343 - RNA, 23 nt, synthetic construct
  misc_feature 1..23: note = Description of Artificial Sequence: Synthetic oligonucleotide
  source 1..23: mol_type = other RNA
  modified_base 1: mod_base = OTHER; note = 2'-O-methyladenosine-3'-phosphorothioate
  modified_base 2: mod_base = OTHER; note = 2'-fluoroguanosine-3'-phosphorothioate
  modified_base 3: mod_base = OTHER; note = 2'-O-methyluridine-3'-phosphate
  modified_base 4: mod_base = OTHER; note = 2'-O-methyluridine-3'-phosphate
  modified_base 5: mod_base = OTHER; note = 2'-O-methylguanosine-3'-phosphate
  modified_base 6: mod_base = OTHER; note = 2'-O-methyluridine-3'-phosphate
  modified_base 7: mod_base = OTHER; note = Cytidine-glycol nucleic acid (GNA)
  modified_base 8: mod_base = OTHER; note = 2'-O-methyladenosine-3'-phosphate
  modified_base 9: mod_base = OTHER; note = 2'-O-methylcytidine-3'-phosphate
  modified_base 10: mod_base = OTHER; note = 2'-O-methyladenosine-3'-phosphate
  modified_base 11: mod_base = OTHER; note = 2'-O-methylguanosine-3'-phosphate
  modified_base 12: mod_base = OTHER; note = 2'-O-methyladenosine-3'-phosphate
  modified_base 13: mod_base = OTHER; note = 2'-O-methyluridine-3'-phosphate
  modified_base 14: mod_base = OTHER; note = 2'-fluorocytidine-3'-phosphate
  modified_base 15: mod_base = OTHER; note = 2'-O-methylguanosine-3'-phosphate
  modified_base 16: mod_base = OTHER; note = 2'-fluorocytidine-3'-phosphate
  modified_base 17: mod_base = OTHER; note = 2'-O-methyluridine-3'-phosphate
  modified_base 18: mod_base = OTHER; note = 2'-O-methylguanosine-3'-phosphate
  modified_base 19: mod_base = OTHER; note = 2'-O-methyluridine-3'-phosphate
  modified_base 20: mod_base = OTHER; note = 2'-O-methylcytidine-3'-phosphate
  modified_base 21: mod_base = OTHER; note = 2'-O-methyluridine-3'-phosphorothioate
  modified_base 22: mod_base = OTHER; note = 2'-O-methylguanosine-3'-phosphorothioate
  modified_base 23: mod_base = OTHER; note = 2'-O-methylcytidine-3'-phosphate
agttgtcacagatcgctgtctgc

SEQ ID NO: 344 - RNA, 23 nt, synthetic construct
  misc_feature 1..23: note = Description of Artificial Sequence: Synthetic oligonucleotide
  source 1..23: mol_type = other RNA
  modified_base 1: mod_base = OTHER; note = 2'-O-methyladenosine-3'-phosphorothioate
  modified_base 2: mod_base = OTHER; note = 2'-fluorocytidine-3'-phosphorothioate
  modified_base 3: mod_base = OTHER; note = 2'-O-methyluridine-3'-phosphate
  modified_base 4: mod_base = OTHER; note = 2'-O-methyluridine-3'-phosphate
  modified_base 5: mod_base = OTHER; note = 2'-O-methylguanosine-3'-phosphate
  modified_base 6: mod_base = OTHER; note = 2'-O-methyladenosine-3'-phosphate
  modified_base 7: mod_base = OTHER; note = Cytidine-glycol nucleic acid (GNA)
  modified_base 8: mod_base = OTHER; note = 2'-O-methyluridine-3'-phosphate
  modified_base 9: mod_base = OTHER; note = 2'-O-methyluridine-3'-phosphate
  modified_base 10: mod_base = OTHER; note = 2'-O-methyluridine-3'-phosphate
  modified_base 11: mod_base = OTHER; note = 2'-O-methylguanosine-3'-phosphate
  modified_base 12: mod_base = OTHER; note = 2'-O-methyluridine-3'-phosphate
  modified_base 13: mod_base = OTHER; note = 2'-O-methylcytidine-3'-phosphate
  modified_base 14: mod_base = OTHER; note = 2'-fluoroadenosine-3'-phosphate
  modified_base 15: mod_base = OTHER; note = 2'-O-methyluridine-3'-phosphate
  modified_base 16: mod_base = OTHER; note = 2'-fluoroadenosine-3'-phosphate
  modified_base 17: mod_base = OTHER; note = 2'-O-methylguanosine-3'-phosphate
  modified_base 18: mod_base = OTHER; note = 2'-O-methylcytidine-3'-phosphate
  modified_base 19: mod_base = OTHER; note = 2'-O-methylcytidine-3'-phosphate
  modified_base 20: mod_base = OTHER; note = 2'-O-methyluridine-3'-phosphate
  modified_base 21: mod_base = OTHER; note = 2'-O-methylguanosine-3'-phosphorothioate
  modified_base 22: mod_base = OTHER; note = 2'-O-methylguanosine-3'-phosphorothioate
  modified_base 23: mod_base = OTHER; note = 2'-O-methylguanosine-3'-phosphate
acttgactttgtcatagcctggg

SEQ ID NO: 345 - RNA, 23 nt, synthetic construct
  misc_feature 1..23: note = Description of Artificial Sequence: Synthetic oligonucleotide
  source 1..23: mol_type = other RNA
  modified_base 1: mod_base = OTHER; note = 2'-O-methyladenosine-3'-phosphorothioate
  modified_base 2: mod_base = OTHER; note = 2'-fluoroguanosine-3'-phosphorothioate
  modified_base 3: mod_base = OTHER; note = 2'-O-methyluridine-3'-phosphate
  modified_base 4: mod_base = OTHER; note = 2'-O-methyluridine-3'-phosphate
  modified_base 5: mod_base = OTHER; note = 2'-O-methylguanosine-3'-phosphate
  modified_base 6: mod_base = OTHER; note = 2'-O-methylguanosine-3'-phosphate
  modified_base 7: mod_base = OTHER; note = Adenosine-glycol nucleic acid (GNA)
  modified_base 8: mod_base = OTHER; note = 2'-O-methylguanosine-3'-phosphate
  modified_base 9: mod_base = OTHER; note = 2'-O-methylguanosine-3'-phosphate
  modified_base 10: mod_base = OTHER; note = 2'-O-methyladenosine-3'-phosphate
  modified_base 11: mod_base = OTHER; note = 2'-O-methyladenosine-3'-phosphate
  modified_base 12: mod_base = OTHER; note = 2'-O-methylguanosine-3'-phosphate
  modified_base 13: mod_base = OTHER; note = 2'-O-methylcytidine-3'-phosphate
  modified_base 14: mod_base = OTHER; note = 2'-fluorocytidine-3'-phosphate
  modified_base 15: mod_base = OTHER; note = 2'-O-methyluridine-3'-phosphate
  modified_base 16: mod_base = OTHER; note = 2'-fluorocytidine-3'-phosphate
  modified_base 17: mod_base = OTHER; note = 2'-O-methyladenosine-3'-phosphate
  modified_base 18: mod_base = OTHER; note = 2'-O-methyladenosine-3'-phosphate
  modified_base 19: mod_base = OTHER; note = 2'-O-methyladenosine-3'-phosphate
  modified_base 20: mod_base = OTHER; note = 2'-O-methylguanosine-3'-phosphate
  modified_base 21: mod_base = OTHER; note = 2'-O-methylcytidine-3'-phosphorothioate
  modified_base 22: mod_base = OTHER; note = 2'-O-methyluridine-3'-phosphorothioate
  modified_base 23: mod_base = OTHER; note = 2'-O-methylcytidine-3'-phosphate
agttggaggaagcctcaaagctc

SEQ ID NO: 346 - RNA, 23 nt, synthetic construct
  misc_feature 1..23: note = Description of Artificial Sequence: Synthetic oligonucleotide
  source 1..23: mol_type = other RNA
  modified_base 1: mod_base = OTHER; note = 2'-O-methyladenosine-3'-phosphorothioate
  modified_base 2: mod_base = OTHER; note = 2'-fluoroadenosine-3'-phosphorothioate
  modified_base 3: mod_base = OTHER; note = 2'-O-methylguanosine-3'-phosphate
  modified_base 4: mod_base = OTHER; note = 2'-O-methylguanosine-3'-phosphate
  modified_base 5: mod_base = OTHER; note = 2'-O-methylguanosine-3'-phosphate
  modified_base 6: mod_base = OTHER; note = 2'-O-methylcytidine-3'-phosphate
  modified_base 7: mod_base = OTHER; note = Adenosine-glycol nucleic acid (GNA)
  modified_base 8: mod_base = OTHER; note = 2'-O-methyladenosine-3'-phosphate
  modified_base 9: mod_base = OTHER; note = 2'-O-methylcytidine-3'-phosphate
  modified_base 10: mod_base = OTHER; note = 2'-O-methylguanosine-3'-phosphate
  modified_base 11: mod_base = OTHER; note = 2'-O-methyluridine-3'-phosphate
  modified_base 12: mod_base = OTHER; note = 2'-O-methylcytidine-3'-phosphate
  modified_base 13: mod_base = OTHER; note = 2'-O-methyladenosine-3'-phosphate
  modified_base 14: mod_base = OTHER; note = 2'-fluorouridine-3'-phosphate
  modified_base 15: mod_base = OTHER; note = 2'-O-methyladenosine-3'-phosphate
  modified_base 16: mod_base = OTHER; note = 2'-fluoroguanosine-3'-phosphate
  modified_base 17: mod_base = OTHER; note = 2'-O-methyluridine-3'-phosphate
  modified_base 18: mod_base = OTHER; note = 2'-O-methylcytidine-3'-phosphate
  modified_base 19: mod_base = OTHER; note = 2'-O-methyladenosine-3'-phosphate
  modified_base 20: mod_base = OTHER; note = 2'-O-methyluridine-3'-phosphate
  modified_base 21: mod_base = OTHER; note = 2'-O-methyladenosine-3'-phosphorothioate
  modified_base 22: mod_base = OTHER; note = 2'-O-methyladenosine-3'-phosphorothioate
  modified_base 23: mod_base = OTHER; note = 2'-O-methyladenosine-3'-phosphate
aagggcaacgtcatagtcataaa

SEQ ID NO: 347 - DNA, 23 bp, synthetic construct
  misc_feature 1..23: note = Description of Artificial Sequence: Synthetic oligonucleotide
  source 1..23: mol_type = other DNA
  modified_base 1: mod_base = OTHER; note = 2'-O-methyladenosine-3'-phosphorothioate
  modified_base 2: mod_base = OTHER; note = 2'-fluorocytidine-3'-phosphorothioate
  modified_base 3: mod_base = OTHER; note = 2'-O-methylcytidine-3'-phosphate
  modified_base 4: mod_base = OTHER; note = 2'-O-methylguanosine-3'-phosphate
  modified_base 5: mod_base = OTHER; note = 2'-O-methylcytidine-3'-phosphate
  modified_base 6: mod_base = OTHER; note = 2'-O-methyluridine-3'-phosphate
  modified_base 7: mod_base = OTHER; note = Thymidine-glycol nucleic acid (GNA) S-Isomer
  modified_base 8: mod_base = OTHER; note = 2'-O-methylcytidine-3'-phosphate
  modified_base 9: mod_base = OTHER; note = 2'-O-methyluridine-3'-phosphate
  modified_base 10: mod_base = OTHER; note = 2'-O-methylguanosine-3'-phosphate
  modified_base 11: mod_base = OTHER; note = 2'-O-methylguanosine-3'-phosphate
  modified_base 12: mod_base = OTHER; note = 2'-O-methyluridine-3'-phosphate
  modified_base 13: mod_base = OTHER; note = 2'-O-methyluridine-3'-phosphate
  modified_base 14: mod_base = OTHER; note = 2'-fluorouridine-3'-phosphate
  modified_base 15: mod_base = OTHER; note = 2'-O-methyluridine-3'-phosphate
  modified_base 16: mod_base = OTHER; note = 2'-fluorouridine-3'-phosphate
  modified_base 17: mod_base = OTHER; note = 2'-O-methylguanosine-3'-phosphate
  modified_base 18: mod_base = OTHER; note = 2'-O-methylcytidine-3'-phosphate
  modified_base 19: mod_base = OTHER; note = 2'-O-methyladenosine-3'-phosphate
  modified_base 20: mod_base = OTHER; note = 2'-O-methylguanosine-3'-phosphate
  modified_base 21: mod_base = OTHER; note = 2'-O-methyladenosine-3'-phosphorothioate
  modified_base 22: mod_base = OTHER; note = 2'-O-methylcytidine-3'-phosphorothioate
  modified_base 23: mod_base = OTHER; note = 2'-O-methyladenosine-3'-phosphate
  misc_feature 1..6: note = RNA
  misc_feature 7: note = DNA
  misc_feature 8..23: note = RNA
accgcttctggtttttgcagaca

SEQ ID NO: 348 - RNA, 23 nt, synthetic construct
  misc_feature 1..23: note = Description of Artificial Sequence: Synthetic oligonucleotide
  source 1..23: mol_type = other RNA
  modified_base 1: mod_base = OTHER; note = 2'-O-methyladenosine-3'-phosphorothioate
  modified_base 2: mod_base = OTHER; note = 2'-fluoroguanosine-3'-phosphorothioate
  modified_base 3: mod_base = OTHER; note = 2'-O-methyluridine-3'-phosphate
  modified_base 4: mod_base = OTHER; note = 2'-O-methylcytidine-3'-phosphate
  modified_base 5: mod_base = OTHER; note = 2'-O-methyladenosine-3'-phosphate
  modified_base 6: mod_base = OTHER; note = 2'-O-methyluridine-3'-phosphate
  modified_base 7: mod_base = OTHER; note = Adenosine-glycol nucleic acid (GNA)
  modified_base 8: mod_base = OTHER; note = 2'-O-methylguanosine-3'-phosphate
  modified_base 9: mod_base = OTHER; note = 2'-O-methylcytidine-3'-phosphate
  modified_base 10: mod_base = OTHER; note = 2'-O-methyladenosine-3'-phosphate
  modified_base 11: mod_base = OTHER; note = 2'-O-methylguanosine-3'-phosphate
  modified_base 12: mod_base = OTHER; note = 2'-O-methyluridine-3'-phosphate
  modified_base 13: mod_base = OTHER; note = 2'-O-methylguanosine-3'-phosphate
  modified_base 14: mod_base = OTHER; note = 2'-fluoroguanosine-3'-phosphate
  modified_base 15: mod_base = OTHER; note = 2'-O-methyladenosine-3'-phosphate
  modified_base 16: mod_base = OTHER; note = 2'-fluoroadenosine-3'-phosphate
  modified_base 17: mod_base = OTHER; note = 2'-O-methyladenosine-3'-phosphate
  modified_base 18: mod_base = OTHER; note = 2'-O-methylguanosine-3'-phosphate
  modified_base 19: mod_base = OTHER; note = 2'-O-methyladenosine-3'-phosphate
  modified_base 20: mod_base = OTHER; note = 2'-O-methylguanosine-3'-phosphate
  modified_base 21: mod_base = OTHER; note = 2'-O-methyladenosine-3'-phosphorothioate
  modified_base 22: mod_base = OTHER; note = 2'-O-methyluridine-3'-phosphorothioate
  modified_base 23: mod_base = OTHER; note = 2'-O-methylcytidine-3'-phosphate
agtcatagcagtggaaagagatc

SEQ ID NO: 349 - RNA, 23 nt, synthetic construct
  misc_feature 1..23: note = Description of Artificial Sequence: Synthetic oligonucleotide
  source 1..23: mol_type = other RNA
  modified_base 1: mod_base = OTHER; note = 2'-O-methyladenosine-3'-phosphorothioate
  modified_base 2: mod_base = OTHER; note = 2'-fluorocytidine-3'-phosphorothioate
  modified_base 3: mod_base = OTHER; note = 2'-O-methylcytidine-3'-phosphate
  modified_base 4: mod_base = OTHER; note = 2'-O-methylguanosine-3'-phosphate
  modified_base 5: mod_base = OTHER; note = 2'-O-methylguanosine-3'-phosphate
  modified_base 6: mod_base = OTHER; note = 2'-O-methyladenosine-3'-phosphate
  modified_base 7: mod_base = OTHER; note = Guanosine-glycol nucleic acid (GNA)
  modified_base 8: mod_base = OTHER; note = 2'-O-methyladenosine-3'-phosphate
  modified_base 9: mod_base = OTHER; note = 2'-O-methylguanosine-3'-phosphate
  modified_base 10: mod_base = OTHER; note = 2'-O-methyluridine-3'-phosphate
  modified_base 11: mod_base = OTHER; note = 2'-O-methylguanosine-3'-phosphate
  modified_base 12: mod_base = OTHER; note = 2'-O-methyluridine-3'-phosphate
  modified_base 13: mod_base = OTHER; note = 2'-O-methyladenosine-3'-phosphate
  modified_base 14: mod_base = OTHER; note = 2'-fluoroadenosine-3'-phosphate
  modified_base 15: mod_base = OTHER; note = 2'-O-methylcytidine-3'-phosphate
  modified_base 16: mod_base = OTHER; note = 2'-fluorocytidine-3'-phosphate
  modified_base 17: mod_base = OTHER; note = 2'-O-methylguanosine-3'-phosphate
  modified_base 18: mod_base = OTHER; note = 2'-O-methyluridine-3'-phosphate
  modified_base 19: mod_base = OTHER; note = 2'-O-methylcytidine-3'-phosphate
  modified_base 20: mod_base = OTHER; note = 2'-O-methyladenosine-3'-phosphate
  modified_base 21: mod_base = OTHER; note = 2'-O-methyluridine-3'-phosphorothioate
  modified_base 22: mod_base = OTHER; note = 2'-O-methyladenosine-3'-phosphorothioate
  modified_base 23: mod_base = OTHER; note = 2'-O-methylguanosine-3'-phosphate
accggagagtgtaaccgtcatag

SEQ ID NO: 350 - RNA, 23 nt, synthetic construct
  misc_feature 1..23: note = Description of Artificial Sequence: Synthetic oligonucleotide
  source 1..23: mol_type = other RNA
  modified_base 1: mod_base = OTHER; note = 2'-O-methyladenosine-3'-phosphorothioate
  modified_base 2: mod_base = OTHER; note = 2'-fluoroadenosine-3'-phosphorothioate
  modified_base 3: mod_base = OTHER; note = 2'-O-methyluridine-3'-phosphate
  modified_base 4: mod_base = OTHER; note = 2'-O-methylcytidine-3'-phosphate
  modified_base 5: mod_base = OTHER; note = 2'-O-methylcytidine-3'-phosphate
  modified_base 6: mod_base = OTHER; note = 2'-O-methyladenosine-3'-phosphate
  modified_base 7: mod_base = OTHER; note = Guanosine-glycol nucleic acid (GNA)
  modified_base 8: mod_base = OTHER; note = 2'-O-methyladenosine-3'-phosphate
  modified_base 9: mod_base = OTHER; note = 2'-O-methyluridine-3'-phosphate
  modified_base 10: mod_base = OTHER; note = 2'-O-methyladenosine-3'-phosphate
  modified_base 11: mod_base = OTHER; note = 2'-O-methyladenosine-3'-phosphate
  modified_base 12: mod_base = OTHER; note = 2'-O-methyluridine-3'-phosphate
  modified_base 13: mod_base = OTHER; note = 2'-O-methylcytidine-3'-phosphate
  modified_base 14: mod_base = OTHER; note = 2'-fluorocytidine-3'-phosphate
  modified_base 15: mod_base = OTHER; note = 2'-O-methyluridine-3'-phosphate
  modified_base 16: mod_base = OTHER; note = 2'-fluorocytidine-3'-phosphate
  modified_base 17: mod_base = OTHER; note = 2'-O-methylcytidine-3'-phosphate
  modified_base 18: mod_base = OTHER; note = 2'-O-methylcytidine-3'-phosphate
  modified_base 19: mod_base = OTHER; note = 2'-O-methyluridine-3'-phosphate
  modified_base 20: mod_base = OTHER; note = 2'-O-methyluridine-3'-phosphate
  modified_base 21: mod_base = OTHER; note = 2'-O-methylguanosine-3'-phosphorothioate
  modified_base 22: mod_base = OTHER; note = 2'-O-methylguanosine-3'-phosphorothioate
  modified_base 23: mod_base = OTHER; note = 2'-O-methylguanosine-3'-phosphate
aatccagataatcctcccttggg

SEQ ID NO: 351 - DNA, 23 bp, synthetic construct
  misc_feature 1..23: note = Description of Artificial Sequence: Synthetic oligonucleotide
  source 1..23: mol_type = other DNA
  modified_base 1: mod_base = OTHER; note = 2'-O-methyladenosine-3'-phosphorothioate
  modified_base 2: mod_base = OTHER; note = 2'-fluorouridine -3'-phosphorothioate
  modified_base 3: mod_base = OTHER; note = 2'-O-methylcytidine-3'-phosphate
  modified_base 4: mod_base = OTHER; note = 2'-O-methylcytidine-3'-phosphate
  modified_base 5: mod_base = OTHER; note = 2'-O-methylguanosine-3'-phosphate
  modified_base 6: mod_base = OTHER; note = 2'-O-methyluridine-3'-phosphate
  modified_base 7: mod_base = OTHER; note = Thymidine-glycol nucleic acid (GNA) S-Isomer
  modified_base 8: mod_base = OTHER; note = 2'-O-methylguanosine-3'-phosphate
  modified_base 9: mod_base = OTHER; note = 2'-O-methyluridine-3'-phosphate
  modified_base 10: mod_base = OTHER; note = 2'-O-methylcytidine-3'-phosphate
  modified_base 11: mod_base = OTHER; note = 2'-O-methyladenosine-3'-phosphate
  modified_base 12: mod_base = OTHER; note = 2'-O-methylcytidine-3'-phosphate
  modified_base 13: mod_base = OTHER; note = 2'-O-methyladenosine-3'-phosphate
  modified_base 14: mod_base = OTHER; note = 2'-fluoroguanosine-3'-phosphate
  modified_base 15: mod_base = OTHER; note = 2'-O-methyladenosine-3'-phosphate
  modified_base 16: mod_base = OTHER; note = 2'-fluorouridine-3'-phosphate
  modified_base 17: mod_base = OTHER; note = 2'-O-methylcytidine-3'-phosphate
  modified_base 18: mod_base = OTHER; note = 2'-O-methylguanosine-3'-phosphate
  modified_base 19: mod_base = OTHER; note = 2'-O-methylcytidine-3'-phosphate
  modified_base 20: mod_base = OTHER; note = 2'-O-methyluridine-3'-phosphate
  modified_base 21: mod_base = OTHER; note = 2'-O-methylguanosine-3'-phosphorothioate
  modified_base 22: mod_base = OTHER; note = 2'-O-methyluridine-3'-phosphorothioate
  modified_base 23: mod_base = OTHER; note = 2'-O-methylcytidine-3'-phosphate
  misc_feature 1..6: note = RNA
  misc_feature 7: note = DNA
  misc_feature 8..23: note = RNA
atccgttgtcacagatcgctgtc

SEQ ID NO: 352 - RNA, 23 nt, synthetic construct
  misc_feature 1..23: note = Description of Artificial Sequence: Synthetic oligonucleotide
  source 1..23: mol_type = other RNA
  modified_base 1: mod_base = OTHER; note = 2'-O-methyladenosine-3'-phosphorothioate
  modified_base 2: mod_base = OTHER; note = 2'-fluorouridine -3'-phosphorothioate
  modified_base 3: mod_base = OTHER; note = 2'-O-methylguanosine-3'-phosphate
  modified_base 4: mod_base = OTHER; note = 2'-O-methylguanosine-3'-phosphate
  modified_base 5: mod_base = OTHER; note = 2'-O-methyluridine-3'-phosphate
  modified_base 6: mod_base = OTHER; note = 2'-O-methyladenosine-3'-phosphate
  modified_base 7: mod_base = OTHER; note = Guanosine-glycol nucleic acid (GNA)
  modified_base 8: mod_base = OTHER; note = 2'-O-methyluridine-3'-phosphate
  modified_base 9: mod_base = OTHER; note = 2'-O-methyluridine-3'-phosphate
  modified_base 10: mod_base = OTHER; note = 2'-O-methylguanosine-3'-phosphate
  modified_base 11: mod_base = OTHER; note = 2'-O-methylguanosine-3'-phosphate
  modified_base 12: mod_base = OTHER; note = 2'-O-methyladenosine-3'-phosphate
  modified_base 13: mod_base = OTHER; note = 2'-O-methylguanosine-3'-phosphate
  modified_base 14: mod_base = OTHER; note = 2'-fluoroguanosine-3'-phosphate
  modified_base 15: mod_base = OTHER; note = 2'-O-methyladenosine-3'-phosphate
  modified_base 16: mod_base = OTHER; note = 2'-fluoroadenosine-3'-phosphate
  modified_base 17: mod_base = OTHER; note = 2'-O-methylguanosine-3'-phosphate
  modified_base 18: mod_base = OTHER; note = 2'-O-methylcytidine-3'-phosphate
  modified_base 19: mod_base = OTHER; note = 2'-O-methylcytidine-3'-phosphate
  modified_base 20: mod_base = OTHER; note = 2'-O-methyluridine-3'-phosphate
  modified_base 21: mod_base = OTHER; note = 2'-O-methylcytidine-3'-phosphorothioate
  modified_base 22: mod_base = OTHER; note = 2'-O-methyladenosine-3'-phosphorothioate
  modified_base 23: mod_base = OTHER; note = 2'-O-methyladenosine-3'-phosphate
atggtagttggaggaagcctcaa

SEQ ID NO: 353 - RNA, 23 nt, synthetic construct
  misc_feature 1..23: note = Description of Artificial Sequence: Synthetic oligonucleotide
  source 1..23: mol_type = other RNA
  modified_base 1: mod_base = OTHER; note = 2'-O-methyladenosine-3'-phosphorothioate
  modified_base 2: mod_base = OTHER; note = 2'-fluorocytidine-3'-phosphorothioate
  modified_base 3: mod_base = OTHER; note = 2'-O-methylguanosine-3'-phosphate
  modified_base 4: mod_base = OTHER; note = 2'-O-methylguanosine-3'-phosphate
  modified_base 5: mod_base = OTHER; note = 2'-O-methyladenosine-3'-phosphate
  modified_base 6: mod_base = OTHER; note = 2'-O-methylguanosine-3'-phosphate
  modified_base 7: mod_base = OTHER; note = Adenosine-glycol nucleic acid (GNA)
  modified_base 8: mod_base = OTHER; note = 2'-O-methylguanosine-3'-phosphate
  modified_base 9: mod_base = OTHER; note = 2'-O-methyluridine-3'-phosphate
  modified_base 10: mod_base = OTHER; note = 2'-O-methylguanosine-3'-phosphate
  modified_base 11: mod_base = OTHER; note = 2'-O-methyluridine-3'-phosphate
  modified_base 12: mod_base = OTHER; note = 2'-O-methyladenosine-3'-phosphate
  modified_base 13: mod_base = OTHER; note = 2'-O-methyladenosine-3'-phosphate
  modified_base 14: mod_base = OTHER; note = 2'-fluorocytidine-3'-phosphate
  modified_base 15: mod_base = OTHER; note = 2'-O-methylcytidine-3'-phosphate
  modified_base 16: mod_base = OTHER; note = 2'-fluoroguanosine-3'-phosphate
  modified_base 17: mod_base = OTHER; note = 2'-O-methyluridine-3'-phosphate
  modified_base 18: mod_base = OTHER; note = 2'-O-methylcytidine-3'-phosphate
  modified_base 19: mod_base = OTHER; note = 2'-O-methyladenosine-3'-phosphate
  modified_base 20: mod_base = OTHER; note = 2'-O-methyluridine-3'-phosphate
  modified_base 21: mod_base = OTHER; note = 2'-O-methyladenosine-3'-phosphorothioate
  modified_base 22: mod_base = OTHER; note = 2'-O-methylguanosine-3'-phosphorothioate
  modified_base 23: mod_base = OTHER; note = 2'-O-methylcytidine-3'-phosphate
acggagagtgtaaccgtcatagc

SEQ ID NO: 354 - RNA, 23 nt, synthetic construct
  misc_feature 1..23: note = Description of Artificial Sequence: Synthetic oligonucleotide
  source 1..23: mol_type = other RNA
  modified_base 1: mod_base = OTHER; note = 2'-O-methyladenosine-3'-phosphorothioate
  modified_base 2: mod_base = OTHER; note = 2'-fluoroguanosine-3'-phosphorothioate
  modified_base 3: mod_base = OTHER; note = 2'-O-methylcytidine-3'-phosphate
  modified_base 4: mod_base = OTHER; note = 2'-O-methylcytidine-3'-phosphate
  modified_base 5: mod_base = OTHER; note = 2'-O-methyluridine-3'-phosphate
  modified_base 6: mod_base = OTHER; note = 2'-O-methylcytidine-3'-phosphate
  modified_base 7: mod_base = OTHER; note = Adenosine-glycol nucleic acid (GNA)
  modified_base 8: mod_base = OTHER; note = 2'-O-methyladenosine-3'-phosphate
  modified_base 9: mod_base = OTHER; note = 2'-O-methyladenosine-3'-phosphate
  modified_base 10: mod_base = OTHER; note = 2'-O-methylguanosine-3'-phosphate
  modified_base 11: mod_base = OTHER; note = 2'-O-methylcytidine-3'-phosphate
  modified_base 12: mod_base = OTHER; note = 2'-O-methyluridine-3'-phosphate
  modified_base 13: mod_base = OTHER; note = 2'-O-methylcytidine-3'-phosphate
  modified_base 14: mod_base = OTHER; note = 2'-fluoroguanosine-3'-phosphate
  modified_base 15: mod_base = OTHER; note = 2'-O-methyladenosine-3'-phosphate
  modified_base 16: mod_base = OTHER; note = 2'-fluoroguanosine-3'-phosphate
  modified_base 17: mod_base = OTHER; note = 2'-O-methyluridine-3'-phosphate
  modified_base 18: mod_base = OTHER; note = 2'-O-methyluridine-3'-phosphate
  modified_base 19: mod_base = OTHER; note = 2'-O-methylguanosine-3'-phosphate
  modified_base 20: mod_base = OTHER; note = 2'-O-methyluridine-3'-phosphate
  modified_base 21: mod_base = OTHER; note = 2'-O-methyluridine-3'-phosphorothioate
  modified_base 22: mod_base = OTHER; note = 2'-O-methylcytidine-3'-phosphorothioate
  modified_base 23: mod_base = OTHER; note = 2'-O-methylcytidine-3'-phosphate
agcctcaaagctcgagttgttcc

SEQ ID NO: 355 - RNA, 23 nt, synthetic construct
  misc_feature 1..23: note = Description of Artificial Sequence: Synthetic oligonucleotide
  source 1..23: mol_type = other RNA
  modified_base 1: mod_base = OTHER; note = 2'-O-methyladenosine-3'-phosphorothioate
  modified_base 2: mod_base = OTHER; note = 2'-fluorocytidine-3'-phosphorothioate
  modified_base 3: mod_base = OTHER; note = 2'-O-methylcytidine-3'-phosphate
  modified_base 4: mod_base = OTHER; note = 2'-O-methylguanosine-3'-phosphate
  modified_base 5: mod_base = OTHER; note = 2'-O-methyluridine-3'-phosphate
  modified_base 6: mod_base = OTHER; note = 2'-O-methylcytidine-3'-phosphate
  modified_base 7: mod_base = OTHER; note = Adenosine-glycol nucleic acid (GNA)
  modified_base 8: mod_base = OTHER; note = 2'-O-methyluridine-3'-phosphate
  modified_base 9: mod_base = OTHER; note = 2'-O-methyladenosine-3'-phosphate
  modified_base 10: mod_base = OTHER; note = 2'-O-methylguanosine-3'-phosphate
  modified_base 11: mod_base = OTHER; note = 2'-O-methylcytidine-3'-phosphate
  modified_base 12: mod_base = OTHER; note = 2'-O-methyladenosine-3'-phosphate
  modified_base 13: mod_base = OTHER; note = 2'-O-methylguanosine-3'-phosphate
  modified_base 14: mod_base = OTHER; note = 2'-fluorouridine-3'-phosphate
  modified_base 15: mod_base = OTHER; note = 2'-O-methylguanosine-3'-phosphate
  modified_base 16: mod_base = OTHER; note = 2'-fluoroguanosine-3'-phosphate
  modified_base 17: mod_base = OTHER; note = 2'-O-methyladenosine-3'-phosphate
  modified_base 18: mod_base = OTHER; note = 2'-O-methyladenosine-3'-phosphate
  modified_base 19: mod_base = OTHER; note = 2'-O-methyladenosine-3'-phosphate
  modified_base 20: mod_base = OTHER; note = 2'-O-methylguanosine-3'-phosphate
  modified_base 21: mod_base = OTHER; note = 2'-O-methyladenosine-3'-phosphorothioate
  modified_base 22: mod_base = OTHER; note = 2'-O-methylguanosine-3'-phosphorothioate
  modified_base 23: mod_base = OTHER; note = 2'-O-methyladenosine-3'-phosphate
accgtcatagcagtggaaagaga

SEQ ID NO: 356 - RNA, 23 nt, synthetic construct
  misc_feature 1..23: note = Description of Artificial Sequence: Synthetic oligonucleotide
  source 1..23: mol_type = other RNA
  modified_base 1: mod_base = OTHER; note = 2'-O-methyladenosine-3'-phosphorothioate
  modified_base 2: mod_base = OTHER; note = 2'-fluorocytidine-3'-phosphorothioate
  modified_base 3: mod_base = OTHER; note = 2'-O-methyluridine-3'-phosphate
  modified_base 4: mod_base = OTHER; note = 2'-O-methyluridine-3'-phosphate
  modified_base 5: mod_base = OTHER; note = 2'-O-methylguanosine-3'-phosphate
  modified_base 6: mod_base = OTHER; note = 2'-O-methyladenosine-3'-phosphate
  modified_base 7: mod_base = OTHER; note = Cytidine-glycol nucleic acid (GNA)
  modified_base 8: mod_base = OTHER; note = 2'-O-methyluridine-3'-phosphate
  modified_base 9: mod_base = OTHER; note = 2'-O-methyluridine-3'-phosphate
  modified_base 10: mod_base = OTHER; note = 2'-O-methyluridine-3'-phosphate
  modified_base 11: mod_base = OTHER; note = 2'-O-methylguanosine-3'-phosphate
  modified_base 12: mod_base = OTHER; note = 2'-O-methyladenosine-3'-phosphate
  modified_base 13: mod_base = OTHER; note = 2'-O-methyladenosine-3'-phosphate
  modified_base 14: mod_base = OTHER; note = 2'-fluorocytidine-3'-phosphate
  modified_base 15: mod_base = OTHER; note = 2'-O-methyladenosine-3'-phosphate
  modified_base 16: mod_base = OTHER; note = 2'-fluorocytidine-3'-phosphate
  modified_base 17: mod_base = OTHER; note = 2'-O-methyladenosine-3'-phosphate
  modified_base 18: mod_base = OTHER; note = 2'-O-methyluridine-3'-phosphate
  modified_base 19: mod_base = OTHER; note = 2'-O-methylguanosine-3'-phosphate
  modified_base 20: mod_base = OTHER; note = 2'-O-methyluridine-3'-phosphate
  modified_base 21: mod_base = OTHER; note = 2'-O-methyluridine-3'-phosphorothioate
  modified_base 22: mod_base = OTHER; note = 2'-O-methylguanosine-3'-phosphorothioate
  modified_base 23: mod_base = OTHER; note = 2'-O-methylcytidine-3'-phosphate
acttgactttgaacacatgttgc

SEQ ID NO: 357 - RNA, 23 nt, synthetic construct
  misc_feature 1..23: note = Description of Artificial Sequence: Synthetic oligonucleotide
  source 1..23: mol_type = other RNA
  modified_base 1: mod_base = OTHER; note = 2'-O-methyladenosine-3'-phosphorothioate
  modified_base 2: mod_base = OTHER; note = 2'-fluoroadenosine-3'-phosphorothioate
  modified_base 3: mod_base = OTHER; note = 2'-O-methyluridine-3'-phosphate
  modified_base 4: mod_base = OTHER; note = 2'-O-methylguanosine-3'-phosphate
  modified_base 5: mod_base = OTHER; note = 2'-O-methyluridine-3'-phosphate
  modified_base 6: mod_base = OTHER; note = 2'-O-methyluridine-3'-phosphate
  modified_base 7: mod_base = OTHER; note = Cytidine-glycol nucleic acid (GNA)
  modified_base 8: mod_base = OTHER; note = 2'-O-methyladenosine-3'-phosphate
  modified_base 9: mod_base = OTHER; note = 2'-O-methyluridine-3'-phosphate
  modified_base 10: mod_base = OTHER; note = 2'-O-methylguanosine-3'-phosphate
  modified_base 11: mod_base = OTHER; note = 2'-O-methylguanosine-3'-phosphate
  modified_base 12: mod_base = OTHER; note = 2'-O-methyladenosine-3'-phosphate
  modified_base 13: mod_base = OTHER; note = 2'-O-methylguanosine-3'-phosphate
  modified_base 14: mod_base = OTHER; note = 2'-fluorocytidine-3'-phosphate
  modified_base 15: mod_base = OTHER; note = 2'-O-methylcytidine-3'-phosphate
  modified_base 16: mod_base = OTHER; note = 2'-fluorouridine-3'-phosphate
  modified_base 17: mod_base = OTHER; note = 2'-O-methylguanosine-3'-phosphate
  modified_base 18: mod_base = OTHER; note = 2'-O-methyladenosine-3'-phosphate
  modified_base 19: mod_base = OTHER; note = 2'-O-methyladenosine-3'-phosphate
  modified_base 20: mod_base = OTHER; note = 2'-O-methylguanosine-3'-phosphate
  modified_base 21: mod_base = OTHER; note = 2'-O-methylguanosine-3'-phosphorothioate
  modified_base 22: mod_base = OTHER; note = 2'-O-methylguanosine-3'-phosphorothioate
  modified_base 23: mod_base = OTHER; note = 2'-O-methyluridine-3'-phosphate
aatgttcatggagcctgaagggt

SEQ ID NO: 358 - RNA, 23 nt, synthetic construct
  misc_feature 1..23: note = Description of Artificial Sequence: Synthetic oligonucleotide
  source 1..23: mol_type = other RNA
  modified_base 1: mod_base = OTHER; note = 2'-O-methyladenosine-3'-phosphorothioate
  modified_base 2: mod_base = OTHER; note = 2'-fluorocytidine-3'-phosphorothioate
  modified_base 3: mod_base = OTHER; note = 2'-O-methyluridine-3'-phosphate
  modified_base 4: mod_base = OTHER; note = 2'-O-methyluridine-3'-phosphate
  modified_base 5: mod_base = OTHER; note = 2'-O-methylguanosine-3'-phosphate
  modified_base 6: mod_base = OTHER; note = 2'-O-methyladenosine-3'-phosphate
  modified_base 7: mod_base = OTHER; note = Adenosine-glycol nucleic acid (GNA)
  modified_base 8: mod_base = OTHER; note = 2'-O-methyluridine-3'-phosphate
  modified_base 9: mod_base = OTHER; note = 2'-O-methylguanosine-3'-phosphate
  modified_base 10: mod_base = OTHER; note = 2'-O-methyladenosine-3'-phosphate
  modified_base 11: mod_base = OTHER; note = 2'-O-methyladenosine-3'-phosphate
  modified_base 12: mod_base = OTHER; note = 2'-O-methyladenosine-3'-phosphate
  modified_base 13: mod_base = OTHER; note = 2'-O-methylcytidine-3'-phosphate
  modified_base 14: mod_base = OTHER; note = 2'-fluoroguanosine-3'-phosphate
  modified_base 15: mod_base = OTHER; note = 2'-O-methyladenosine-3'-phosphate
  modified_base 16: mod_base = OTHER; note = 2'-fluorocytidine-3'-phosphate
  modified_base 17: mod_base = OTHER; note = 2'-O-methyluridine-3'-phosphate
  modified_base 18: mod_base = OTHER; note = 2'-O-methyluridine-3'-phosphate
  modified_base 19: mod_base = OTHER; note = 2'-O-methylcytidine-3'-phosphate
  modified_base 20: mod_base = OTHER; note = 2'-O-methyluridine-3'-phosphate
  modified_base 21: mod_base = OTHER; note = 2'-O-methylcytidine-3'-phosphorothioate
  modified_base 22: mod_base = OTHER; note = 2'-O-methyluridine-3'-phosphorothioate
  modified_base 23: mod_base = OTHER; note = 2'-O-methyluridine-3'-phosphate
acttgaatgaaacgacttctctt

SEQ ID NO: 359 - DNA, 23 bp, synthetic construct
  misc_feature 1..23: note = Description of Artificial Sequence: Synthetic oligonucleotide
  source 1..23: mol_type = other DNA
  modified_base 1: mod_base = OTHER; note = 2'-O-methyladenosine-3'-phosphorothioate
  modified_base 2: mod_base = OTHER; note = 2'-fluoroguanosine-3'-phosphorothioate
  modified_base 3: mod_base = OTHER; note = 2'-O-methylcytidine-3'-phosphate
  modified_base 4: mod_base = OTHER; note = 2'-O-methyluridine-3'-phosphate
  modified_base 5: mod_base = OTHER; note = 2'-O-methyluridine-3'-phosphate
  modified_base 6: mod_base = OTHER; note = 2'-O-methylguanosine-3'-phosphate
  modified_base 7: mod_base = OTHER; note = Thymidine-glycol nucleic acid (GNA) S-Isomer
  modified_base 8: mod_base = OTHER; note = 2'-O-methylguanosine-3'-phosphate
  modified_base 9: mod_base = OTHER; note = 2'-O-methylguanosine-3'-phosphate
  modified_base 10: mod_base = OTHER; note = 2'-O-methyluridine-3'-phosphate
  modified_base 11: mod_base = OTHER; note = 2'-O-methyladenosine-3'-phosphate
  modified_base 12: mod_base = OTHER; note = 2'-O-methyladenosine-3'-phosphate
  modified_base 13: mod_base = OTHER; note = 2'-O-methyluridine-3'-phosphate
  modified_base 14: mod_base = OTHER; note = 2'-fluorocytidine-3'-phosphate
  modified_base 15: mod_base = OTHER; note = 2'-O-methylguanosine-3'-phosphate
  modified_base 16: mod_base = OTHER; note = 2'-fluoroguanosine-3'-phosphate
  modified_base 17: mod_base = OTHER; note = 2'-O-methyluridine-3'-phosphate
  modified_base 18: mod_base = OTHER; note = 2'-O-methyladenosine-3'-phosphate
  modified_base 19: mod_base = OTHER; note = 2'-O-methylcytidine-3'-phosphate
  modified_base 20: mod_base = OTHER; note = 2'-O-methylcytidine-3'-phosphate
  modified_base 21: mod_base = OTHER; note = 2'-O-methylcytidine-3'-phosphorothioate
  modified_base 22: mod_base = OTHER; note = 2'-O-methyluridine-3'-phosphorothioate
  modified_base 23: mod_base = OTHER; note = 2'-O-methyluridine-3'-phosphate
  misc_feature 1..6: note = RNA
  misc_feature 7: note = DNA
  misc_feature 8..23: note = RNA
agcttgtggtaatcggtaccctt

SEQ ID NO: 360 - DNA, 23 bp, synthetic construct
  misc_feature 1..23: note = Description of Artificial Sequence: Synthetic oligonucleotide
  source 1..23: mol_type = other DNA
  modified_base 1: mod_base = OTHER; note = 2'-O-methyladenosine-3'-phosphorothioate
  modified_base 2: mod_base = OTHER; note = 2'-fluorocytidine-3'-phosphorothioate
  modified_base 3: mod_base = OTHER; note = 2'-O-methylcytidine-3'-phosphate
  modified_base 4: mod_base = OTHER; note = 2'-O-methyladenosine-3'-phosphate
  modified_base 5: mod_base = OTHER; note = 2'-O-methyluridine-3'-phosphate
  modified_base 6: mod_base = OTHER; note = 2'-O-methylguanosine-3'-phosphate
  modified_base 7: mod_base = OTHER; note = Thymidine-glycol nucleic acid (GNA) S-Isomer
  modified_base 8: mod_base = OTHER; note = 2'-O-methyluridine-3'-phosphate
  modified_base 9: mod_base = OTHER; note = 2'-O-methylguanosine-3'-phosphate
  modified_base 10: mod_base = OTHER; note = 2'-O-methyluridine-3'-phosphate
  modified_base 11: mod_base = OTHER; note = 2'-O-methylguanosine-3'-phosphate
  modified_base 12: mod_base = OTHER; note = 2'-O-methylcytidine-3'-phosphate
  modified_base 13: mod_base = OTHER; note = 2'-O-methyladenosine-3'-phosphate
  modified_base 14: mod_base = OTHER; note = 2'-fluoroadenosine-3'-phosphate
  modified_base 15: mod_base = OTHER; note = 2'-O-methyluridine-3'-phosphate
  modified_base 16: mod_base = OTHER; note = 2'-fluorocytidine-3'-phosphate
  modified_base 17: mod_base = OTHER; note = 2'-O-methylcytidine-3'-phosphate
  modified_base 18: mod_base = OTHER; note = 2'-O-methyladenosine-3'-phosphate
  modified_base 19: mod_base = OTHER; note = 2'-O-methyluridine-3'-phosphate
  modified_base 20: mod_base = OTHER; note = 2'-O-methylcytidine-3'-phosphate
  modified_base 21: mod_base = OTHER; note = 2'-O-methyladenosine-3'-phosphorothioate
  modified_base 22: mod_base = OTHER; note = 2'-O-methylguanosine-3'-phosphorothioate
  modified_base 23: mod_base = OTHER; note = 2'-O-methyluridine-3'-phosphate
  misc_feature 1..6: note = RNA
  misc_feature 7: note = DNA
  misc_feature 8..23: note = RNA
accatgttgtgcaatccatcagt

SEQ ID NO: 361 - RNA, 23 nt, synthetic construct
  misc_feature 1..23: note = Description of Artificial Sequence: Synthetic oligonucleotide
  source 1..23: mol_type = other RNA
  modified_base 1: mod_base = OTHER; note = 2'-O-methyladenosine-3'-phosphorothioate
  modified_base 2: mod_base = OTHER; note = 2'-fluoroadenosine-3'-phosphorothioate
  modified_base 3: mod_base = OTHER; note = 2'-O-methyladenosine-3'-phosphate
  modified_base 4: mod_base = OTHER; note = 2'-O-methylguanosine-3'-phosphate
  modified_base 5: mod_base = OTHER; note = 2'-O-methylcytidine-3'-phosphate
  modified_base 6: mod_base = OTHER; note = 2'-O-methyluridine-3'-phosphate
  modified_base 7: mod_base = OTHER; note = Cytidine-glycol nucleic acid (GNA)
  modified_base 8: mod_base = OTHER; note = 2'-O-methylguanosine-3'-phosphate
  modified_base 9: mod_base = OTHER; note = 2'-O-methyladenosine-3'-phosphate
  modified_base 10: mod_base = OTHER; note = 2'-O-methylguanosine-3'-phosphate
  modified_base 11: mod_base = OTHER; note = 2'-O-methyluridine-3'-phosphate
  modified_base 12: mod_base = OTHER; note = 2'-O-methyluridine-3'-phosphate
  modified_base 13: mod_base = OTHER; note = 2'-O-methylguanosine-3'-phosphate
  modified_base 14: mod_base = OTHER; note = 2'-fluorouridine-3'-phosphate
  modified_base 15: mod_base = OTHER; note = 2'-O-methyluridine-3'-phosphate
  modified_base 16: mod_base = OTHER; note = 2'-fluorocytidine-3'-phosphate
  modified_base 17: mod_base = OTHER; note = 2'-O-methylcytidine-3'-phosphate
  modified_base 18: mod_base = OTHER; note = 2'-O-methylcytidine-3'-phosphate
  modified_base 19: mod_base = OTHER; note = 2'-O-methyluridine-3'-phosphate
  modified_base 20: mod_base = OTHER; note = 2'-O-methylcytidine-3'-phosphate
  modified_base 21: mod_base = OTHER; note = 2'-O-methylguanosine-3'-phosphorothioate
  modified_base 22: mod_base = OTHER; note = 2'-O-methylguanosine-3'-phosphorothioate
  modified_base 23: mod_base = OTHER; note = 2'-O-methyluridine-3'-phosphate
aaagctcgagttgttccctcggt

SEQ ID NO: 362 - RNA, 23 nt, synthetic construct
  misc_feature 1..23: note = Description of Artificial Sequence: Synthetic oligonucleotide
  source 1..23: mol_type = other RNA
  modified_base 1: mod_base = OTHER; note = 2'-O-methyladenosine-3'-phosphorothioate
  modified_base 2: mod_base = OTHER; note = 2'-fluoroguanosine-3'-phosphorothioate
  modified_base 3: mod_base = OTHER; note = 2'-O-methylguanosine-3'-phosphate
  modified_base 4: mod_base = OTHER; note = 2'-O-methylcytidine-3'-phosphate
  modified_base 5: mod_base = OTHER; note = 2'-O-methyladenosine-3'-phosphate
  modified_base 6: mod_base = OTHER; note = 2'-O-methyladenosine-3'-phosphate
  modified_base 7: mod_base = OTHER; note = Cytidine-glycol nucleic acid (GNA)
  modified_base 8: mod_base = OTHER; note = 2'-O-methylguanosine-3'-phosphate
  modified_base 9: mod_base = OTHER; note = 2'-O-methyluridine-3'-phosphate
  modified_base 10: mod_base = OTHER; note = 2'-O-methylcytidine-3'-phosphate
  modified_base 11: mod_base = OTHER; note = 2'-O-methyladenosine-3'-phosphate
  modified_base 12: mod_base = OTHER; note = 2'-O-methyluridine-3'-phosphate
  modified_base 13: mod_base = OTHER; note = 2'-O-methyladenosine-3'-phosphate
  modified_base 14: mod_base = OTHER; note = 2'-fluoroguanosine-3'-phosphate
  modified_base 15: mod_base = OTHER; note = 2'-O-methyluridine-3'-phosphate
  modified_base 16: mod_base = OTHER; note = 2'-fluorocytidine-3'-phosphate
  modified_base 17: mod_base = OTHER; note = 2'-O-methyladenosine-3'-phosphate
  modified_base 18: mod_base = OTHER; note = 2'-O-methyluridine-3'-phosphate
  modified_base 19: mod_base = OTHER; note = 2'-O-methyladenosine-3'-phosphate
  modified_base 20: mod_base = OTHER; note = 2'-O-methyladenosine-3'-phosphate
  modified_base 21: mod_base = OTHER; note = 2'-O-methyladenosine-3'-phosphorothioate
  modified_base 22: mod_base = OTHER; note = 2'-O-methyladenosine-3'-phosphorothioate
  modified_base 23: mod_base = OTHER; note = 2'-O-methyluridine-3'-phosphate
aggcaacgtcatagtcataaaat

SEQ ID NO: 363 - RNA, 23 nt, unidentified
  misc_feature 1..23: note = Description of Unknown: Target sequence
  source 1..23: mol_type = unassigned RNA
gccaaaaagtgtctagtcaactt

SEQ ID NO: 364 - RNA, 23 nt, unidentified
  misc_feature 1..23: note = Description of Unknown: Target sequence
  source 1..23: mol_type = unassigned RNA
agtagtggatgtctgcaaaaacc

SEQ ID NO: 365 - RNA, 23 nt, unidentified
  misc_feature 1..23: note = Description of Unknown: Target sequence
  source 1..23: mol_type = unassigned RNA
aggaattcctgaattttatgact

SEQ ID NO: 366 - RNA, 23 nt, unidentified
  misc_feature 1..23: note = Description of Unknown: Target sequence
  source 1..23: mol_type = unassigned RNA
gagccaaaaagtgtctagtcaac

SEQ ID NO: 367 - RNA, 23 nt, unidentified
  misc_feature 1..23: note = Description of Unknown: Target sequence
  source 1..23: mol_type = unassigned RNA
gttcacaagagaagtcgtttcat

SEQ ID NO: 368 - RNA, 23 nt, unidentified
  misc_feature 1..23: note = Description of Unknown: Target sequence
  source 1..23: mol_type = unassigned RNA
aggagccaaaaagtgtctagtca

SEQ ID NO: 369 - RNA, 23 nt, unidentified
  misc_feature 1..23: note = Description of Unknown: Target sequence
  source 1..23: mol_type = unassigned RNA
ccctactacaatgtgagtgatga

SEQ ID NO: 370 - RNA, 23 nt, unidentified
  misc_feature 1..23: note = Description of Unknown: Target sequence
  source 1..23: mol_type = unassigned RNA
gagaagtcgtttcattcaagttg

SEQ ID NO: 371 - RNA, 23 nt, unidentified
  misc_feature 1..23: note = Description of Unknown: Target sequence
  source 1..23: mol_type = unassigned RNA
atagttcacaagagaagtcgttt

SEQ ID NO: 372 - RNA, 23 nt, unidentified
  misc_feature 1..23: note = Description of Unknown: Target sequence
  source 1..23: mol_type = unassigned RNA
aacaactcgagctttgaggcttc

SEQ ID NO: 373 - RNA, 23 nt, unidentified
  misc_feature 1..23: note = Description of Unknown: Target sequence
  source 1..23: mol_type = unassigned RNA
gagtagtggatgtctgcaaaaac

SEQ ID NO: 374 - RNA, 23 nt, unidentified
  misc_feature 1..23: note = Description of Unknown: Target sequence
  source 1..23: mol_type = unassigned RNA
gggaggattatctggatgtctat

SEQ ID NO: 375 - RNA, 23 nt, unidentified
  misc_feature 1..23: note = Description of Unknown: Target sequence
  source 1..23: mol_type = unassigned RNA
caagactccttcatgtacgacac

SEQ ID NO: 376 - RNA, 23 nt, unidentified
  misc_feature 1..23: note = Description of Unknown: Target sequence
  source 1..23: mol_type = unassigned RNA
ttcacaagagaagtcgtttcatt

SEQ ID NO: 377 - RNA, 23 nt, unidentified
  misc_feature 1..23: note = Description of Unknown: Target sequence
  source 1..23: mol_type = unassigned RNA
tgatagttcacaagagaagtcgt

SEQ ID NO: 378 - RNA, 23 nt, unidentified
  misc_feature 1..23: note = Description of Unknown: Target sequence
  source 1..23: mol_type = unassigned RNA
ggagccaaaaagtgtctagtcaa

SEQ ID NO: 379 - RNA, 23 nt, unidentified
  misc_feature 1..23: note = Description of Unknown: Target sequence
  source 1..23: mol_type = unassigned RNA
attgaattaaaacagctgcgaca

SEQ ID NO: 380 - RNA, 23 nt, unidentified
  misc_feature 1..23: note = Description of Unknown: Target sequence
  source 1..23: mol_type = unassigned RNA
cgagggaacaactcgagctttga

SEQ ID NO: 381 - RNA, 23 nt, unidentified
  misc_feature 1..23: note = Description of Unknown: Target sequence
  source 1..23: mol_type = unassigned RNA
atgacaaagtcaaggacatctca

SEQ ID NO: 382 - RNA, 23 nt, unidentified
  misc_feature 1..23: note = Description of Unknown: Target sequence
  source 1..23: mol_type = unassigned RNA
cttgatagttcacaagagaagtc

SEQ ID NO: 383 - RNA, 23 nt, unidentified
  misc_feature 1..23: note = Description of Unknown: Target sequence
  source 1..23: mol_type = unassigned RNA
agtgtctagtcaacttaattgag

SEQ ID NO: 384 - RNA, 23 nt, unidentified
  misc_feature 1..23: note = Description of Unknown: Target sequence
  source 1..23: mol_type = unassigned RNA
tagttcacaagagaagtcgtttc

SEQ ID NO: 385 - RNA, 23 nt, unidentified
  misc_feature 1..23: note = Description of Unknown: Target sequence
  source 1..23: mol_type = unassigned RNA
gggacccaattactgtcattgat

SEQ ID NO: 386 - RNA, 23 nt, unidentified
  misc_feature 1..23: note = Description of Unknown: Target sequence
  source 1..23: mol_type = unassigned RNA
ctgaattttatgactatgacgtt

SEQ ID NO: 387 - RNA, 23 nt, unidentified
  misc_feature 1..23: note = Description of Unknown: Target sequence
  source 1..23: mol_type = unassigned RNA
gtctggagtttcagcttggacac

SEQ ID NO: 388 - RNA, 23 nt, unidentified
  misc_feature 1..23: note = Description of Unknown: Target sequence
  source 1..23: mol_type = unassigned RNA
aagtgtctagtcaacttaattga

SEQ ID NO: 389 - RNA, 23 nt, unidentified
  misc_feature 1..23: note = Description of Unknown: Target sequence
  source 1..23: mol_type = unassigned RNA
gcttccaagaaagacaatgagca

SEQ ID NO: 390 - RNA, 23 nt, unidentified
  misc_feature 1..23: note = Description of Unknown: Target sequence
  source 1..23: mol_type = unassigned RNA
cactgctatgacggttacactct

SEQ ID NO: 391 - RNA, 23 nt, unidentified
  misc_feature 1..23: note = Description of Unknown: Target sequence
  source 1..23: mol_type = unassigned RNA
ctagtcaacttaattgagaaggt

SEQ ID NO: 392 - RNA, 23 nt, unidentified
  misc_feature 1..23: note = Description of Unknown: Target sequence
  source 1..23: mol_type = unassigned RNA
acatgtgttcaaagtcaaggata

SEQ ID NO: 393 - RNA, 23 nt, unidentified
  misc_feature 1..23: note = Description of Unknown: Target sequence
  source 1..23: mol_type = unassigned RNA
cagacagcgatctgtgacaacgg

SEQ ID NO: 394 - RNA, 23 nt, unidentified
  misc_feature 1..23: note = Description of Unknown: Target sequence
  source 1..23: mol_type = unassigned RNA
caggagccaaaaagtgtctagtc

SEQ ID NO: 395 - RNA, 23 nt, unidentified
  misc_feature 1..23: note = Description of Unknown: Target sequence
  source 1..23: mol_type = unassigned RNA
ccgagggaacaactcgagctttg

SEQ ID NO: 396 - RNA, 23 nt, unidentified
  misc_feature 1..23: note = Description of Unknown: Target sequence
  source 1..23: mol_type = unassigned RNA
ccactgctatgacggttacactc

SEQ ID NO: 397 - RNA, 23 nt, unidentified
  misc_feature 1..23: note = Description of Unknown: Target sequence
  source 1..23: mol_type = unassigned RNA
atctctttccactgctatgacgg

SEQ ID NO: 398 - RNA, 23 nt, unidentified
  misc_feature 1..23: note = Description of Unknown: Target sequence
  source 1..23: mol_type = unassigned RNA
acaactcgagctttgaggcttcc

SEQ ID NO: 399 - RNA, 23 nt, unidentified
  misc_feature 1..23: note = Description of Unknown: Target sequence
  source 1..23: mol_type = unassigned RNA
ggcagacagcgatctgtgacaac

SEQ ID NO: 400 - RNA, 23 nt, unidentified
  misc_feature 1..23: note = Description of Unknown: Target sequence
  source 1..23: mol_type = unassigned RNA
gtccttctggcttctacccgtac

SEQ ID NO: 401 - RNA, 23 nt, unidentified
  misc_feature 1..23: note = Description of Unknown: Target sequence
  source 1..23: mol_type = unassigned RNA
agaccatagaaggagtcgatgct

SEQ ID NO: 402 - RNA, 23 nt, unidentified
  misc_feature 1..23: note = Description of Unknown: Target sequence
  source 1..23: mol_type = unassigned RNA
gaaccaagtgaacatcaatgctt

SEQ ID NO: 403 - RNA, 23 nt, unidentified
  misc_feature 1..23: note = Description of Unknown: Target sequence
  source 1..23: mol_type = unassigned RNA
aatgaaatcaattatgaagacca

SEQ ID NO: 404 - RNA, 23 nt, unidentified
  misc_feature 1..23: note = Description of Unknown: Target sequence
  source 1..23: mol_type = unassigned RNA
ttgatagttcacaagagaagtcg

SEQ ID NO: 405 - RNA, 23 nt, unidentified
  misc_feature 1..23: note = Description of Unknown: Target sequence
  source 1..23: mol_type = unassigned RNA
ggaagggtaccgattaccacaag

SEQ ID NO: 406 - RNA, 23 nt, unidentified
  misc_feature 1..23: note = Description of Unknown: Target sequence
  source 1..23: mol_type = unassigned RNA
gccaagactccttcatgtacgac

SEQ ID NO: 407 - RNA, 23 nt, unidentified
  misc_feature 1..23: note = Description of Unknown: Target sequence
  source 1..23: mol_type = unassigned RNA
agctgactcggaaggaggtctac

SEQ ID NO: 408 - RNA, 23 nt, unidentified
  misc_feature 1..23: note = Description of Unknown: Target sequence
  source 1..23: mol_type = unassigned RNA
gatagttcacaagagaagtcgtt

SEQ ID NO: 409 - RNA, 23 nt, unidentified
  misc_feature 1..23: note = Description of Unknown: Target sequence
  source 1..23: mol_type = unassigned RNA
atgtctgcaaaaaccagaagcgg

SEQ ID NO: 410 - RNA, 23 nt, unidentified
  misc_feature 1..23: note = Description of Unknown: Target sequence
  source 1..23: mol_type = unassigned RNA
acagcgatctgtgacaacggagc

SEQ ID NO: 411 - RNA, 23 nt, unidentified
  misc_feature 1..23: note = Description of Unknown: Target sequence
  source 1..23: mol_type = unassigned RNA
tgactcggaaggaggtctacatc

SEQ ID NO: 412 - RNA, 23 nt, unidentified
  misc_feature 1..23: note = Description of Unknown: Target sequence
  source 1..23: mol_type = unassigned RNA
aagactccttcatgtacgacacc

SEQ ID NO: 413 - RNA, 23 nt, unidentified
  misc_feature 1..23: note = Description of Unknown: Target sequence
  source 1..23: mol_type = unassigned RNA
gaagtcgtttcattcaagttggt

SEQ ID NO: 414 - RNA, 23 nt, unidentified
  misc_feature 1..23: note = Description of Unknown: Target sequence
  source 1..23: mol_type = unassigned RNA
caactcgagctttgaggcttcct

SEQ ID NO: 415 - RNA, 23 nt, unidentified
  misc_feature 1..23: note = Description of Unknown: Target sequence
  source 1..23: mol_type = unassigned RNA
gggaacaactcgagctttgaggc

SEQ ID NO: 416 - RNA, 23 nt, unidentified
  misc_feature 1..23: note = Description of Unknown: Target sequence
  source 1..23: mol_type = unassigned RNA
cctggtgctagatggatcagaca

SEQ ID NO: 417 - RNA, 23 nt, unidentified
  misc_feature 1..23: note = Description of Unknown: Target sequence
  source 1..23: mol_type = unassigned RNA
acgtgtcaggaaggtggctcttg

SEQ ID NO: 418 - RNA, 23 nt, unidentified
  misc_feature 1..23: note = Description of Unknown: Target sequence
  source 1..23: mol_type = unassigned RNA
gactgatggattgcacaacatgg

SEQ ID NO: 419 - RNA, 23 nt, unidentified
  misc_feature 1..23: note = Description of Unknown: Target sequence
  source 1..23: mol_type = unassigned RNA
gccagactatcaggcccatttgt

SEQ ID NO: 420 - RNA, 23 nt, unidentified
  misc_feature 1..23: note = Description of Unknown: Target sequence
  source 1..23: mol_type = unassigned RNA
gagaccatagaaggagtcgatgc

SEQ ID NO: 421 - RNA, 23 nt, unidentified
  misc_feature 1..23: note = Description of Unknown: Target sequence
  source 1..23: mol_type = unassigned RNA
acaggagccaaaaagtgtctagt

SEQ ID NO: 422 - RNA, 23 nt, unidentified
  misc_feature 1..23: note = Description of Unknown: Target sequence
  source 1..23: mol_type = unassigned RNA
agagaccatagaaggagtcgatg

SEQ ID NO: 423 - RNA, 23 nt, unidentified
  misc_feature 1..23: note = Description of Unknown: Target sequence
  source 1..23: mol_type = unassigned RNA
acaagttgaagtcagggactaac

SEQ ID NO: 424 - RNA, 23 nt, unidentified
  misc_feature 1..23: note = Description of Unknown: Target sequence
  source 1..23: mol_type = unassigned RNA
tcgagctttgaggcttcctccaa

SEQ ID NO: 425 - RNA, 23 nt, unidentified
  misc_feature 1..23: note = Description of Unknown: Target sequence
  source 1..23: mol_type = unassigned RNA
aatcaattatgaagaccacaagt

SEQ ID NO: 426 - RNA, 23 nt, unidentified
  misc_feature 1..23: note = Description of Unknown: Target sequence
  source 1..23: mol_type = unassigned RNA
ccaagactccttcatgtacgaca

SEQ ID NO: 427 - RNA, 23 nt, unidentified
  misc_feature 1..23: note = Description of Unknown: Target sequence
  source 1..23: mol_type = unassigned RNA
agctttgaggcttcctccaacta

SEQ ID NO: 428 - RNA, 23 nt, unidentified
  misc_feature 1..23: note = Description of Unknown: Target sequence
  source 1..23: mol_type = unassigned RNA
tgaggcttcctccaactaccact

SEQ ID NO: 429 - RNA, 23 nt, unidentified
  misc_feature 1..23: note = Description of Unknown: Target sequence
  source 1..23: mol_type = unassigned RNA
gcagacagcgatctgtgacaacg

SEQ ID NO: 430 - RNA, 23 nt, unidentified
  misc_feature 1..23: note = Description of Unknown: Target sequence
  source 1..23: mol_type = unassigned RNA
cccaggctatgacaaagtcaagg

SEQ ID NO: 431 - RNA, 23 nt, unidentified
  misc_feature 1..23: note = Description of Unknown: Target sequence
  source 1..23: mol_type = unassigned RNA
gagctttgaggcttcctccaact

SEQ ID NO: 432 - RNA, 23 nt, unidentified
  misc_feature 1..23: note = Description of Unknown: Target sequence
  source 1..23: mol_type = unassigned RNA
tttatgactatgacgttgccctg

SEQ ID NO: 433 - RNA, 23 nt, unidentified
  misc_feature 1..23: note = Description of Unknown: Target sequence
  source 1..23: mol_type = unassigned RNA
tgtctgcaaaaaccagaagcggc

SEQ ID NO: 434 - RNA, 23 nt, unidentified
  misc_feature 1..23: note = Description of Unknown: Target sequence
  source 1..23: mol_type = unassigned RNA
gatctctttccactgctatgacg

SEQ ID NO: 435 - RNA, 23 nt, unidentified
  misc_feature 1..23: note = Description of Unknown: Target sequence
  source 1..23: mol_type = unassigned RNA
ctatgacggttacactctccggg

SEQ ID NO: 436 - RNA, 23 nt, unidentified
  misc_feature 1..23: note = Description of Unknown: Target sequence
  source 1..23: mol_type = unassigned RNA
cccaagggaggattatctggatg

SEQ ID NO: 437 - RNA, 23 nt, unidentified
  misc_feature 1..23: note = Description of Unknown: Target sequence
  source 1..23: mol_type = unassigned RNA
gacagcgatctgtgacaacggag

SEQ ID NO: 438 - RNA, 23 nt, unidentified
  misc_feature 1..23: note = Description of Unknown: Target sequence
  source 1..23: mol_type = unassigned RNA
ttgaggcttcctccaactaccac

SEQ ID NO: 439 - RNA, 23 nt, unidentified
  misc_feature 1..23: note = Description of Unknown: Target sequence
  source 1..23: mol_type = unassigned RNA
gctatgacggttacactctccgg

SEQ ID NO: 440 - RNA, 23 nt, unidentified
  misc_feature 1..23: note = Description of Unknown: Target sequence
  source 1..23: mol_type = unassigned RNA
ggaacaactcgagctttgaggct

SEQ ID NO: 441 - RNA, 23 nt, unidentified
  misc_feature 1..23: note = Description of Unknown: Target sequence
  source 1..23: mol_type = unassigned RNA
tctctttccactgctatgacggt

SEQ ID NO: 442 - RNA, 23 nt, unidentified
  misc_feature 1..23: note = Description of Unknown: Target sequence
  source 1..23: mol_type = unassigned RNA
gcaacatgtgttcaaagtcaagg

SEQ ID NO: 443 - RNA, 23 nt, unidentified
  misc_feature 1..23: note = Description of Unknown: Target sequence
  source 1..23: mol_type = unassigned RNA
acccttcaggctccatgaacatc

SEQ ID NO: 444 - RNA, 23 nt, unidentified
  misc_feature 1..23: note = Description of Unknown: Target sequence
  source 1..23: mol_type = unassigned RNA
aagagaagtcgtttcattcaagt

SEQ ID NO: 445 - RNA, 23 nt, unidentified
  misc_feature 1..23: note = Description of Unknown: Target sequence
  source 1..23: mol_type = unassigned RNA
aagggtaccgattaccacaagca

SEQ ID NO: 446 - RNA, 23 nt, unidentified
  misc_feature 1..23: note = Description of Unknown: Target sequence
  source 1..23: mol_type = unassigned RNA
actgatggattgcacaacatggg

SEQ ID NO: 447 - RNA, 23 nt, unidentified
  misc_feature 1..23: note = Description of Unknown: Target sequence
  source 1..23: mol_type = unassigned RNA
accgagggaacaactcgagcttt

SEQ ID NO: 448 - RNA, 23 nt, unidentified
  misc_feature 1..23: note = Description of Unknown: Target sequence
  source 1..23: mol_type = unassigned RNA
attttatgactatgacgttgccc

SEQ ID NO: 449 - RNA, 21 nt, synthetic construct
  misc_feature 1..21: note = Description of Artificial Sequence: Synthetic oligonucleotide
  source 1..21: mol_type = other RNA
tgccaagactccttcatgtat

SEQ ID NO: 450 - RNA, 21 nt, synthetic construct
  misc_feature 1..21: note = Description of Artificial Sequence: Synthetic oligonucleotide
  source 1..21: mol_type = other RNA
aagagaagtcgtttcattcat

SEQ ID NO: 451 - RNA, 21 nt, synthetic construct
  misc_feature 1..21: note = Description of Artificial Sequence: Synthetic oligonucleotide
  source 1..21: mol_type = other RNA
agagaagtcgtttcattcaat

SEQ ID NO: 452 - RNA, 21 nt, synthetic construct
  misc_feature 1..21: note = Description of Artificial Sequence: Synthetic oligonucleotide
  source 1..21: mol_type = other RNA
tatgaagaccacaagttgaat

SEQ ID NO: 453 - RNA, 21 nt, synthetic construct
  misc_feature 1..21: note = Description of Artificial Sequence: Synthetic oligonucleotide
  source 1..21: mol_type = other RNA
cggaaggaggtctacatcaat

SEQ ID NO: 454 - RNA, 21 nt, synthetic construct
  misc_feature 1..21: note = Description of Artificial Sequence: Synthetic oligonucleotide
  source 1..21: mol_type = other RNA
atcaagctcaagaataagctt

SEQ ID NO: 455 - RNA, 21 nt, synthetic construct
  misc_feature 1..21: note = Description of Artificial Sequence: Synthetic oligonucleotide
  source 1..21: mol_type = other RNA
caagagaagtcgtttcattct

SEQ ID NO: 456 - RNA, 21 nt, synthetic construct
  misc_feature 1..21: note = Description of Artificial Sequence: Synthetic oligonucleotide
  source 1..21: mol_type = other RNA
ctgtggtgtctgagtactttt

SEQ ID NO: 457 - RNA, 21 nt, synthetic construct
  misc_feature 1..21: note = Description of Artificial Sequence: Synthetic oligonucleotide
  source 1..21: mol_type = other RNA
atgagcaacatgtgttcaaat

SEQ ID NO: 458 - RNA, 21 nt, synthetic construct
  misc_feature 1..21: note = Description of Artificial Sequence: Synthetic oligonucleotide
  source 1..21: mol_type = other RNA
acaagagaagtcgtttcattt

SEQ ID NO: 459 - RNA, 21 nt, synthetic construct
  misc_feature 1..21: note = Description of Artificial Sequence: Synthetic oligonucleotide
  source 1..21: mol_type = other RNA
caaagtcaaggatatggaaat

SEQ ID NO: 460 - RNA, 21 nt, synthetic construct
  misc_feature 1..21: note = Description of Artificial Sequence: Synthetic oligonucleotide
  source 1..21: mol_type = other RNA
tggtgtctgagtactttgtgt

SEQ ID NO: 461 - RNA, 21 nt, synthetic construct
  misc_feature 1..21: note = Description of Artificial Sequence: Synthetic oligonucleotide
  source 1..21: mol_type = other RNA
agaagtcgtttcattcaagtt

SEQ ID NO: 462 - RNA, 21 nt, synthetic construct
  misc_feature 1..21: note = Description of Artificial Sequence: Synthetic oligonucleotide
  source 1..21: mol_type = other RNA
ttcaaagtcaaggatatggat

SEQ ID NO: 463 - RNA, 21 nt, synthetic construct
  misc_feature 1..21: note = Description of Artificial Sequence: Synthetic oligonucleotide
  source 1..21: mol_type = other RNA
tcaaagtcaaggatatggaat

SEQ ID NO: 464 - RNA, 21 nt, synthetic construct
  misc_feature 1..21: note = Description of Artificial Sequence: Synthetic oligonucleotide
  source 1..21: mol_type = other RNA
aggaggtctacatcaagaatt

SEQ ID NO: 465 - RNA, 21 nt, synthetic construct
  misc_feature 1..21: note = Description of Artificial Sequence: Synthetic oligonucleotide
  source 1..21: mol_type = other RNA
caacatgtgttcaaagtcaat

SEQ ID NO: 466 - RNA, 21 nt, synthetic construct
  misc_feature 1..21: note = Description of Artificial Sequence: Synthetic oligonucleotide
  source 1..21: mol_type = other RNA
actatcaggcccatttgtctt

SEQ ID NO: 467 - RNA, 21 nt, synthetic construct
  misc_feature 1..21: note = Description of Artificial Sequence: Synthetic oligonucleotide
  source 1..21: mol_type = other RNA
gagcaacatgtgttcaaagtt

SEQ ID NO: 468 - RNA, 21 nt, synthetic construct
  misc_feature 1..21: note = Description of Artificial Sequence: Synthetic oligonucleotide
  source 1..21: mol_type = other RNA
aggattatctggatgtctatt

SEQ ID NO: 469 - RNA, 21 nt, synthetic construct
  misc_feature 1..21: note = Description of Artificial Sequence: Synthetic oligonucleotide
  source 1..21: mol_type = other RNA
gtgttcaaagtcaaggatatt

SEQ ID NO: 470 - RNA, 21 nt, synthetic construct
  misc_feature 1..21: note = Description of Artificial Sequence: Synthetic oligonucleotide
  source 1..21: mol_type = other RNA
aaggaggtctacatcaagaat

SEQ ID NO: 471 - RNA, 21 nt, synthetic construct
  misc_feature 1..21: note = Description of Artificial Sequence: Synthetic oligonucleotide
  source 1..21: mol_type = other RNA
tcaggctccatgaacatctat

SEQ ID NO: 472 - RNA, 21 nt, synthetic construct
  misc_feature 1..21: note = Description of Artificial Sequence: Synthetic oligonucleotide
  source 1..21: mol_type = other RNA
gtggatgtctgcaaaaaccat

SEQ ID NO: 473 - RNA, 21 nt, synthetic construct
  misc_feature 1..21: note = Description of Artificial Sequence: Synthetic oligonucleotide
  source 1..21: mol_type = other RNA
gtgagagagatgctcaatatt

SEQ ID NO: 474 - RNA, 21 nt, synthetic construct
  misc_feature 1..21: note = Description of Artificial Sequence: Synthetic oligonucleotide
  source 1..21: mol_type = other RNA
atcgcacctgccaagtgaatt

SEQ ID NO: 475 - RNA, 21 nt, synthetic construct
  misc_feature 1..21: note = Description of Artificial Sequence: Synthetic oligonucleotide
  source 1..21: mol_type = other RNA
tcacaggagccaaaaagtgtt

SEQ ID NO: 476 - RNA, 21 nt, synthetic construct
  misc_feature 1..21: note = Description of Artificial Sequence: Synthetic oligonucleotide
  source 1..21: mol_type = other RNA
aaaacccaagggaggattatt

SEQ ID NO: 477 - RNA, 21 nt, synthetic construct
  misc_feature 1..21: note = Description of Artificial Sequence: Synthetic oligonucleotide
  source 1..21: mol_type = other RNA
aaaagtgtctagtcaacttat

SEQ ID NO: 478 - RNA, 21 nt, synthetic construct
  misc_feature 1..21: note = Description of Artificial Sequence: Synthetic oligonucleotide
  source 1..21: mol_type = other RNA
cagctcaatgaaatcaattat

SEQ ID NO: 479 - RNA, 21 nt, synthetic construct
  misc_feature 1..21: note = Description of Artificial Sequence: Synthetic oligonucleotide
  source 1..21: mol_type = other RNA
tatctggatgtctatgtgttt

SEQ ID NO: 480 - RNA, 21 nt, synthetic construct
  misc_feature 1..21: note = Description of Artificial Sequence: Synthetic oligonucleotide
  source 1..21: mol_type = other RNA
ggcgtgggattgaattaaaat

SEQ ID NO: 481 - RNA, 21 nt, synthetic construct
  misc_feature 1..21: note = Description of Artificial Sequence: Synthetic oligonucleotide
  source 1..21: mol_type = other RNA
tgagagagatgctcaatatgt

SEQ ID NO: 482 - RNA, 21 nt, synthetic construct
  misc_feature 1..21: note = Description of Artificial Sequence: Synthetic oligonucleotide
  source 1..21: mol_type = other RNA
gtggtgtctgagtactttgtt

SEQ ID NO: 483 - RNA, 21 nt, synthetic construct
  misc_feature 1..21: note = Description of Artificial Sequence: Synthetic oligonucleotide
  source 1..21: mol_type = other RNA
gcagctcaatgaaatcaattt

SEQ ID NO: 484 - RNA, 21 nt, synthetic construct
  misc_feature 1..21: note = Description of Artificial Sequence: Synthetic oligonucleotide
  source 1..21: mol_type = other RNA
cggtctccctactacaatgtt

SEQ ID NO: 485 - RNA, 21 nt, synthetic construct
  misc_feature 1..21: note = Description of Artificial Sequence: Synthetic oligonucleotide
  source 1..21: mol_type = other RNA
gggattgaattaaaacagctt

SEQ ID NO: 486 - RNA, 21 nt, synthetic construct
  misc_feature 1..21: note = Description of Artificial Sequence: Synthetic oligonucleotide
  source 1..21: mol_type = other RNA
aacccaagggaggattatctt

SEQ ID NO: 487 - RNA, 21 nt, synthetic construct
  misc_feature 1..21: note = Description of Artificial Sequence: Synthetic oligonucleotide
  source 1..21: mol_type = other RNA
gtgagtgatgagatctctttt

SEQ ID NO: 488 - RNA, 21 nt, synthetic construct
  misc_feature 1..21: note = Description of Artificial Sequence: Synthetic oligonucleotide
  source 1..21: mol_type = other RNA
acatgtgttcaaagtcaaggt

SEQ ID NO: 489 - RNA, 21 nt, synthetic construct
  misc_feature 1..21: note = Description of Artificial Sequence: Synthetic oligonucleotide
  source 1..21: mol_type = other RNA
agtgtctagtcaacttaattt

SEQ ID NO: 490 - RNA, 21 nt, synthetic construct
  misc_feature 1..21: note = Description of Artificial Sequence: Synthetic oligonucleotide
  source 1..21: mol_type = other RNA
gggcgtgggattgaattaaat

SEQ ID NO: 491 - RNA, 21 nt, synthetic construct
  misc_feature 1..21: note = Description of Artificial Sequence: Synthetic oligonucleotide
  source 1..21: mol_type = other RNA
caagtgaacatcaatgctttt

SEQ ID NO: 492 - RNA, 21 nt, synthetic construct
  misc_feature 1..21: note = Description of Artificial Sequence: Synthetic oligonucleotide
  source 1..21: mol_type = other RNA
attcctgaattttatgactat

SEQ ID NO: 493 - RNA, 21 nt, synthetic construct
  misc_feature 1..21: note = Description of Artificial Sequence: Synthetic oligonucleotide
  source 1..21: mol_type = other RNA
ctcaatgaaatcaattatgat

SEQ ID NO: 494 - RNA, 21 nt, synthetic construct
  misc_feature 1..21: note = Description of Artificial Sequence: Synthetic oligonucleotide
  source 1..21: mol_type = other RNA
ggatgttccgggaaagtgatt

SEQ ID NO: 495 - RNA, 21 nt, synthetic construct
  misc_feature 1..21: note = Description of Artificial Sequence: Synthetic oligonucleotide
  source 1..21: mol_type = other RNA
gatatggtctagtgacatatt

SEQ ID NO: 496 - RNA, 21 nt, synthetic construct
  misc_feature 1..21: note = Description of Artificial Sequence: Synthetic oligonucleotide
  source 1..21: mol_type = other RNA
gcgtgggattgaattaaaact

SEQ ID NO: 497 - RNA, 21 nt, synthetic construct
  misc_feature 1..21: note = Description of Artificial Sequence: Synthetic oligonucleotide
  source 1..21: mol_type = other RNA
aaagtgtctagtcaacttaat

SEQ ID NO: 498 - RNA, 21 nt, synthetic construct
  misc_feature 1..21: note = Description of Artificial Sequence: Synthetic oligonucleotide
  source 1..21: mol_type = other RNA
agctcaatgaaatcaattatt

SEQ ID NO: 499 - RNA, 21 nt, synthetic construct
  misc_feature 1..21: note = Description of Artificial Sequence: Synthetic oligonucleotide
  source 1..21: mol_type = other RNA
caatgaaatcaattatgaagt

SEQ ID NO: 500 - RNA, 21 nt, synthetic construct
  misc_feature 1..21: note = Description of Artificial Sequence: Synthetic oligonucleotide
  source 1..21: mol_type = other RNA
gtgggattgaattaaaacagt

SEQ ID NO: 501 - RNA, 21 nt, synthetic construct
  misc_feature 1..21: note = Description of Artificial Sequence: Synthetic oligonucleotide
  source 1..21: mol_type = other RNA
aagcaggaattcctgaatttt

SEQ ID NO: 502 - RNA, 21 nt, synthetic construct
  misc_feature 1..21: note = Description of Artificial Sequence: Synthetic oligonucleotide
  source 1..21: mol_type = other RNA
tgggattgaattaaaacagct

SEQ ID NO: 503 - RNA, 21 nt, synthetic construct
  misc_feature 1..21: note = Description of Artificial Sequence: Synthetic oligonucleotide
  source 1..21: mol_type = other RNA
acccaattactgtcattgatt

SEQ ID NO: 504 - RNA, 21 nt, synthetic construct
  misc_feature 1..21: note = Description of Artificial Sequence: Synthetic oligonucleotide
  source 1..21: mol_type = other RNA
ccctgcacaggatatcaaagt

SEQ ID NO: 505 - RNA, 21 nt, synthetic construct
  misc_feature 1..21: note = Description of Artificial Sequence: Synthetic oligonucleotide
  source 1..21: mol_type = other RNA
ccaattactgtcattgatgat

SEQ ID NO: 506 - RNA, 21 nt, synthetic construct
  misc_feature 1..21: note = Description of Artificial Sequence: Synthetic oligonucleotide
  source 1..21: mol_type = other RNA
cgtgggattgaattaaaacat

SEQ ID NO: 507 - RNA, 21 nt, synthetic construct
  misc_feature 1..21: note = Description of Artificial Sequence: Synthetic oligonucleotide
  source 1..21: mol_type = other RNA
aggaattcctgaattttatgt

SEQ ID NO: 508 - RNA, 21 nt, synthetic construct
  misc_feature 1..21: note = Description of Artificial Sequence: Synthetic oligonucleotide
  source 1..21: mol_type = other RNA
aattcctgaattttatgactt

SEQ ID NO: 509 - RNA, 21 nt, synthetic construct
  misc_feature 1..21: note = Description of Artificial Sequence: Synthetic oligonucleotide
  source 1..21: mol_type = other RNA
gtctagtcaacttaattgagt

SEQ ID NO: 510 - RNA, 21 nt, synthetic construct
  misc_feature 1..21: note = Description of Artificial Sequence: Synthetic oligonucleotide
  source 1..21: mol_type = other RNA
ggaattcctgaattttatgat

SEQ ID NO: 511 - RNA, 21 nt, synthetic construct
  misc_feature 1..21: note = Description of Artificial Sequence: Synthetic oligonucleotide
  source 1..21: mol_type = other RNA
tggtgtgaagccaagatatgt

SEQ ID NO: 512 - RNA, 21 nt, synthetic construct
  misc_feature 1..21: note = Description of Artificial Sequence: Synthetic oligonucleotide
  source 1..21: mol_type = other RNA
ctccctgcacaggatatcaat

SEQ ID NO: 513 - RNA, 21 nt, synthetic construct
  misc_feature 1..21: note = Description of Artificial Sequence: Synthetic oligonucleotide
  source 1..21: mol_type = other RNA
atggtgtgaagccaagatatt

SEQ ID NO: 514 - RNA, 21 nt, synthetic construct
  misc_feature 1..21: note = Description of Artificial Sequence: Synthetic oligonucleotide
  source 1..21: mol_type = other RNA
tccctgcacaggatatcaaat

SEQ ID NO: 515 - RNA, 21 nt, synthetic construct
  misc_feature 1..21: note = Description of Artificial Sequence: Synthetic oligonucleotide
  source 1..21: mol_type = other RNA
aatgaaatcaattatgaagat

SEQ ID NO: 516 - RNA, 21 nt, synthetic construct
  misc_feature 1..21: note = Description of Artificial Sequence: Synthetic oligonucleotide
  source 1..21: mol_type = other RNA
atctggatgtctatgtgtttt

SEQ ID NO: 517 - RNA, 21 nt, synthetic construct
  misc_feature 1..21: note = Description of Artificial Sequence: Synthetic oligonucleotide
  source 1..21: mol_type = other RNA
tgaaccaagtgaacatcaatt

SEQ ID NO: 518 - RNA, 21 nt, synthetic construct
  misc_feature 1..21: note = Description of Artificial Sequence: Synthetic oligonucleotide
  source 1..21: mol_type = other RNA
caggaattcctgaattttatt

SEQ ID NO: 519 - RNA, 21 nt, synthetic construct
  misc_feature 1..21: note = Description of Artificial Sequence: Synthetic oligonucleotide
  source 1..21: mol_type = other RNA
gtgaaccaagtgaacatcaat

SEQ ID NO: 520 - RNA, 23 nt, synthetic construct
  misc_feature 1..23: note = Description of Artificial Sequence: Synthetic oligonucleotide
  source 1..23: mol_type = other RNA
atacatgaaggagtcttggcagg

SEQ ID NO: 521 - RNA, 23 nt, synthetic construct
  misc_feature 1..23: note = Description of Artificial Sequence: Synthetic oligonucleotide
  source 1..23: mol_type = other RNA
atgaatgaaacgacttctcttgt

SEQ ID NO: 522 - RNA, 23 nt, synthetic construct
  misc_feature 1..23: note = Description of Artificial Sequence: Synthetic oligonucleotide
  source 1..23: mol_type = other RNA
attgaatgaaacgacttctcttg

SEQ ID NO: 523 - RNA, 23 nt, synthetic construct
  misc_feature 1..23: note = Description of Artificial Sequence: Synthetic oligonucleotide
  source 1..23: mol_type = other RNA
attcaacttgtggtcttcataat

SEQ ID NO: 524 - RNA, 23 nt, synthetic construct
  misc_feature 1..23: note = Description of Artificial Sequence: Synthetic oligonucleotide
  source 1..23: mol_type = other RNA
attgatgtagacctccttccgag

SEQ ID NO: 525 - RNA, 23 nt, synthetic construct
  misc_feature 1..23: note = Description of Artificial Sequence: Synthetic oligonucleotide
  source 1..23: mol_type = other RNA
aagcttattcttgagcttgatca

SEQ ID NO: 526 - RNA, 23 nt, synthetic construct
  misc_feature 1..23: note = Description of Artificial Sequence: Synthetic oligonucleotide
  source 1..23: mol_type = other RNA
agaatgaaacgacttctcttgtg

SEQ ID NO: 527 - RNA, 23 nt, synthetic construct
  misc_feature 1..23: note = Description of Artificial Sequence: Synthetic oligonucleotide
  source 1..23: mol_type = other RNA
aaaagtactcagacaccacagcc

SEQ ID NO: 528 - RNA, 23 nt, synthetic construct
  misc_feature 1..23: note = Description of Artificial Sequence: Synthetic oligonucleotide
  source 1..23: mol_type = other RNA
atttgaacacatgttgctcattg

SEQ ID NO: 529 - RNA, 23 nt, synthetic construct
  misc_feature 1..23: note = Description of Artificial Sequence: Synthetic oligonucleotide
  source 1..23: mol_type = other RNA
aaatgaaacgacttctcttgtga

SEQ ID NO: 530 - RNA, 23 nt, synthetic construct
  misc_feature 1..23: note = Description of Artificial Sequence: Synthetic oligonucleotide
  source 1..23: mol_type = other RNA
atttccatatccttgactttgaa

SEQ ID NO: 531 - RNA, 23 nt, synthetic construct
  misc_feature 1..23: note = Description of Artificial Sequence: Synthetic oligonucleotide
  source 1..23: mol_type = other RNA
acacaaagtactcagacaccaca

SEQ ID NO: 532 - RNA, 23 nt, synthetic construct
  misc_feature 1..23: note = Description of Artificial Sequence: Synthetic oligonucleotide
  source 1..23: mol_type = other RNA
aacttgaatgaaacgacttctct

SEQ ID NO: 533 - RNA, 23 nt, synthetic construct
  misc_feature 1..23: note = Description of Artificial Sequence: Synthetic oligonucleotide
  source 1..23: mol_type = other RNA
atccatatccttgactttgaaca

SEQ ID NO: 534 - RNA, 23 nt, synthetic construct
  misc_feature 1..23: note = Description of Artificial Sequence: Synthetic oligonucleotide
  source 1..23: mol_type = other RNA
attccatatccttgactttgaac

SEQ ID NO: 535 - RNA, 23 nt, synthetic construct
  misc_feature 1..23: note = Description of Artificial Sequence: Synthetic oligonucleotide
  source 1..23: mol_type = other RNA
aattcttgatgtagacctccttc

SEQ ID NO: 536 - RNA, 23 nt, synthetic construct
  misc_feature 1..23: note = Description of Artificial Sequence: Synthetic oligonucleotide
  source 1..23: mol_type = other RNA
attgactttgaacacatgttgct

SEQ ID NO: 537 - RNA, 23 nt, synthetic construct
  misc_feature 1..23: note = Description of Artificial Sequence: Synthetic oligonucleotide
  source 1..23: mol_type = other RNA
aagacaaatgggcctgatagtct

SEQ ID NO: 538 - RNA, 23 nt, synthetic construct
  misc_feature 1..23: note = Description of Artificial Sequence: Synthetic oligonucleotide
  source 1..23: mol_type = other RNA
aactttgaacacatgttgctcat

SEQ ID NO: 539 - RNA, 23 nt, synthetic construct
  misc_feature 1..23: note = Description of Artificial Sequence: Synthetic oligonucleotide
  source 1..23: mol_type = other RNA
aatagacatccagataatcctcc

SEQ ID NO: 540 - RNA, 23 nt, synthetic construct
  misc_feature 1..23: note = Description of Artificial Sequence: Synthetic oligonucleotide
  source 1..23: mol_type = other RNA
aatatccttgactttgaacacat

SEQ ID NO: 541 - RNA, 23 nt, synthetic construct
  misc_feature 1..23: note = Description of Artificial Sequence: Synthetic oligonucleotide
  source 1..23: mol_type = other RNA
attcttgatgtagacctccttcc

SEQ ID NO: 542 - RNA, 23 nt, synthetic construct
  misc_feature 1..23: note = Description of Artificial Sequence: Synthetic oligonucleotide
  source 1..23: mol_type = other RNA
atagatgttcatggagcctgaag

SEQ ID NO: 543 - RNA, 23 nt, synthetic construct
  misc_feature 1..23: note = Description of Artificial Sequence: Synthetic oligonucleotide
  source 1..23: mol_type = other RNA
atggtttttgcagacatccacta

SEQ ID NO: 544 - RNA, 23 nt, synthetic construct
  misc_feature 1..23: note = Description of Artificial Sequence: Synthetic oligonucleotide
  source 1..23: mol_type = other RNA
aatattgagcatctctctcacag

SEQ ID NO: 545 - RNA, 23 nt, synthetic construct
  misc_feature 1..23: note = Description of Artificial Sequence: Synthetic oligonucleotide
  source 1..23: mol_type = other RNA
aattcacttggcaggtgcgattg

SEQ ID NO: 546 - RNA, 23 nt, synthetic construct
  misc_feature 1..23: note = Description of Artificial Sequence: Synthetic oligonucleotide
  source 1..23: mol_type = other RNA
aacactttttggctcctgtgaag

SEQ ID NO: 547 - RNA, 23 nt, synthetic construct
  misc_feature 1..23: note = Description of Artificial Sequence: Synthetic oligonucleotide
  source 1..23: mol_type = other RNA
aataatcctcccttgggtttttg

SEQ ID NO: 548 - RNA, 23 nt, synthetic construct
  misc_feature 1..23: note = Description of Artificial Sequence: Synthetic oligonucleotide
  source 1..23: mol_type = other RNA
ataagttgactagacactttttg

SEQ ID NO: 549 - RNA, 23 nt, synthetic construct
  misc_feature 1..23: note = Description of Artificial Sequence: Synthetic oligonucleotide
  source 1..23: mol_type = other RNA
ataattgatttcattgagctgct

SEQ ID NO: 550 - RNA, 23 nt, synthetic construct
  misc_feature 1..23: note = Description of Artificial Sequence: Synthetic oligonucleotide
  source 1..23: mol_type = other RNA
aaacacatagacatccagataat

SEQ ID NO: 551 - RNA, 23 nt, synthetic construct
  misc_feature 1..23: note = Description of Artificial Sequence: Synthetic oligonucleotide
  source 1..23: mol_type = other RNA
attttaattcaatcccacgcccc

SEQ ID NO: 552 - RNA, 23 nt, synthetic construct
  misc_feature 1..23: note = Description of Artificial Sequence: Synthetic oligonucleotide
  source 1..23: mol_type = other RNA
acatattgagcatctctctcaca

SEQ ID NO: 553 - RNA, 23 nt, synthetic construct
  misc_feature 1..23: note = Description of Artificial Sequence: Synthetic oligonucleotide
  source 1..23: mol_type = other RNA
aacaaagtactcagacaccacag

SEQ ID NO: 554 - RNA, 23 nt, synthetic construct
  misc_feature 1..23: note = Description of Artificial Sequence: Synthetic oligonucleotide
  source 1..23: mol_type = other RNA
aaattgatttcattgagctgctt

SEQ ID NO: 555 - RNA, 23 nt, synthetic construct
  misc_feature 1..23: note = Description of Artificial Sequence: Synthetic oligonucleotide
  source 1..23: mol_type = other RNA
aacattgtagtagggagaccggg

SEQ ID NO: 556 - RNA, 23 nt, synthetic construct
  misc_feature 1..23: note = Description of Artificial Sequence: Synthetic oligonucleotide
  source 1..23: mol_type = other RNA
aagctgttttaattcaatcccac

SEQ ID NO: 557 - RNA, 23 nt, synthetic construct
  misc_feature 1..23: note = Description of Artificial Sequence: Synthetic oligonucleotide
  source 1..23: mol_type = other RNA
aagataatcctcccttgggtttt

SEQ ID NO: 558 - RNA, 23 nt, synthetic construct
  misc_feature 1..23: note = Description of Artificial Sequence: Synthetic oligonucleotide
  source 1..23: mol_type = other RNA
aaaagagatctcatcactcacat

SEQ ID NO: 559 - RNA, 23 nt, synthetic construct
  misc_feature 1..23: note = Description of Artificial Sequence: Synthetic oligonucleotide
  source 1..23: mol_type = other RNA
accttgactttgaacacatgttg

SEQ ID NO: 560 - RNA, 23 nt, synthetic construct
  misc_feature 1..23: note = Description of Artificial Sequence: Synthetic oligonucleotide
  source 1..23: mol_type = other RNA
aaattaagttgactagacacttt

SEQ ID NO: 561 - RNA, 23 nt, synthetic construct
  misc_feature 1..23: note = Description of Artificial Sequence: Synthetic oligonucleotide
  source 1..23: mol_type = other RNA
atttaattcaatcccacgcccct

SEQ ID NO: 562 - RNA, 23 nt, synthetic construct
  misc_feature 1..23: note = Description of Artificial Sequence: Synthetic oligonucleotide
  source 1..23: mol_type = other RNA
aaaagcattgatgttcacttggt

SEQ ID NO: 563 - RNA, 23 nt, synthetic construct
  misc_feature 1..23: note = Description of Artificial Sequence: Synthetic oligonucleotide
  source 1..23: mol_type = other RNA
atagtcataaaattcaggaattc

SEQ ID NO: 564 - RNA, 23 nt, synthetic construct
  misc_feature 1..23: note = Description of Artificial Sequence: Synthetic oligonucleotide
  source 1..23: mol_type = other RNA
atcataattgatttcattgagct

SEQ ID NO: 565 - RNA, 23 nt, synthetic construct
  misc_feature 1..23: note = Description of Artificial Sequence: Synthetic oligonucleotide
  source 1..23: mol_type = other RNA
aatcactttcccggaacatccaa

SEQ ID NO: 566 - RNA, 23 nt, synthetic construct
  misc_feature 1..23: note = Description of Artificial Sequence: Synthetic oligonucleotide
  source 1..23: mol_type = other RNA
aatatgtcactagaccatatctt

SEQ ID NO: 567 - RNA, 23 nt, synthetic construct
  misc_feature 1..23: note = Description of Artificial Sequence: Synthetic oligonucleotide
  source 1..23: mol_type = other RNA
agttttaattcaatcccacgccc

SEQ ID NO: 568 - RNA, 23 nt, synthetic construct
  misc_feature 1..23: note = Description of Artificial Sequence: Synthetic oligonucleotide
  source 1..23: mol_type = other RNA
attaagttgactagacacttttt

SEQ ID NO: 569 - RNA, 23 nt, synthetic construct
  misc_feature 1..23: note = Description of Artificial Sequence: Synthetic oligonucleotide
  source 1..23: mol_type = other RNA
aataattgatttcattgagctgc

SEQ ID NO: 570 - RNA, 23 nt, synthetic construct
  misc_feature 1..23: note = Description of Artificial Sequence: Synthetic oligonucleotide
  source 1..23: mol_type = other RNA
acttcataattgatttcattgag

SEQ ID NO: 571 - RNA, 23 nt, synthetic construct
  misc_feature 1..23: note = Description of Artificial Sequence: Synthetic oligonucleotide
  source 1..23: mol_type = other RNA
actgttttaattcaatcccacgc

SEQ ID NO: 572 - RNA, 23 nt, synthetic construct
  misc_feature 1..23: note = Description of Artificial Sequence: Synthetic oligonucleotide
  source 1..23: mol_type = other RNA
aaaattcaggaattcctgcttct

SEQ ID NO: 573 - RNA, 23 nt, synthetic construct
  misc_feature 1..23: note = Description of Artificial Sequence: Synthetic oligonucleotide
  source 1..23: mol_type = other RNA
agctgttttaattcaatcccacg

SEQ ID NO: 574 - RNA, 23 nt, synthetic construct
  misc_feature 1..23: note = Description of Artificial Sequence: Synthetic oligonucleotide
  source 1..23: mol_type = other RNA
aatcaatgacagtaattgggtcc

SEQ ID NO: 575 - RNA, 23 nt, synthetic construct
  misc_feature 1..23: note = Description of Artificial Sequence: Synthetic oligonucleotide
  source 1..23: mol_type = other RNA
actttgatatcctgtgcagggag

SEQ ID NO: 576 - RNA, 23 nt, synthetic construct
  misc_feature 1..23: note = Description of Artificial Sequence: Synthetic oligonucleotide
  source 1..23: mol_type = other RNA
atcatcaatgacagtaattgggt

SEQ ID NO: 577 - RNA, 23 nt, synthetic construct
  misc_feature 1..23: note = Description of Artificial Sequence: Synthetic oligonucleotide
  source 1..23: mol_type = other RNA
atgttttaattcaatcccacgcc

SEQ ID NO: 578 - RNA, 23 nt, synthetic construct
  misc_feature 1..23: note = Description of Artificial Sequence: Synthetic oligonucleotide
  source 1..23: mol_type = other RNA
acataaaattcaggaattcctgc

SEQ ID NO: 579 - RNA, 23 nt, synthetic construct
  misc_feature 1..23: note = Description of Artificial Sequence: Synthetic oligonucleotide
  source 1..23: mol_type = other RNA
aagtcataaaattcaggaattcc

SEQ ID NO: 580 - RNA, 23 nt, synthetic construct
  misc_feature 1..23: note = Description of Artificial Sequence: Synthetic oligonucleotide
  source 1..23: mol_type = other RNA
actcaattaagttgactagacac

SEQ ID NO: 581 - RNA, 23 nt, synthetic construct
  misc_feature 1..23: note = Description of Artificial Sequence: Synthetic oligonucleotide
  source 1..23: mol_type = other RNA
atcataaaattcaggaattcctg

SEQ ID NO: 582 - RNA, 23 nt, synthetic construct
  misc_feature 1..23: note = Description of Artificial Sequence: Synthetic oligonucleotide
  source 1..23: mol_type = other RNA
acatatcttggcttcacaccata

SEQ ID NO: 583 - RNA, 23 nt, synthetic construct
  misc_feature 1..23: note = Description of Artificial Sequence: Synthetic oligonucleotide
  source 1..23: mol_type = other RNA
attgatatcctgtgcagggagca

SEQ ID NO: 584 - RNA, 23 nt, synthetic construct
  misc_feature 1..23: note = Description of Artificial Sequence: Synthetic oligonucleotide
  source 1..23: mol_type = other RNA
aatatcttggcttcacaccataa

SEQ ID NO: 585 - RNA, 23 nt, synthetic construct
  misc_feature 1..23: note = Description of Artificial Sequence: Synthetic oligonucleotide
  source 1..23: mol_type = other RNA
atttgatatcctgtgcagggagc

SEQ ID NO: 586 - RNA, 23 nt, synthetic construct
  misc_feature 1..23: note = Description of Artificial Sequence: Synthetic oligonucleotide
  source 1..23: mol_type = other RNA
atcttcataattgatttcattga

SEQ ID NO: 587 - RNA, 23 nt, synthetic construct
  misc_feature 1..23: note = Description of Artificial Sequence: Synthetic oligonucleotide
  source 1..23: mol_type = other RNA
aaaacacatagacatccagataa

SEQ ID NO: 588 - RNA, 23 nt, synthetic construct
  misc_feature 1..23: note = Description of Artificial Sequence: Synthetic oligonucleotide
  source 1..23: mol_type = other RNA
aattgatgttcacttggttcacc

SEQ ID NO: 589 - RNA, 23 nt, synthetic construct
  misc_feature 1..23: note = Description of Artificial Sequence: Synthetic oligonucleotide
  source 1..23: mol_type = other RNA
aataaaattcaggaattcctgct

SEQ ID NO: 590 - RNA, 23 nt, synthetic construct
  misc_feature 1..23: note = Description of Artificial Sequence: Synthetic oligonucleotide
  source 1..23: mol_type = other RNA
attgatgttcacttggttcacca

SEQ ID NO: 591 - RNA, 21 nt, synthetic construct
  misc_feature 1..21: note = Description of Artificial Sequence: Synthetic oligonucleotide
  source 1..21: mol_type = other RNA
  modified_base 1: mod_base = OTHER; note = 2'-O-methyluridine-3'-phosphorothioate
  modified_base 2: mod_base = OTHER; note = 2'-O-methylguanosine-3'-phosphorothioate
  modified_base 3: mod_base = OTHER; note = 2'-O-methylcytidine-3'-phosphate
  modified_base 4: mod_base = OTHER; note = 2'-O-methylcytidine-3'-phosphate
  modified_base 5: mod_base = OTHER; note = 2'-O-methyladenosine-3'-phosphate
  modified_base 6: mod_base = OTHER; note = 2'-O-methyladenosine-3'-phosphate
  modified_base 7: mod_base = OTHER; note = 2'-fluoroguanosine-3'-phosphate
  modified_base 8: mod_base = OTHER; note = 2'-O-methyladenosine-3'-phosphate
  modified_base 9: mod_base = OTHER; note = 2'-fluorocytidine-3'-phosphate
  modified_base 10: mod_base = OTHER; note = 2'-fluorouridine-3'-phosphate
  modified_base 11: mod_base = OTHER; note = 2'-fluorocytidine-3'-phosphate
  modified_base 12: mod_base = OTHER; note = 2'-O-methylcytidine-3'-phosphate
  modified_base 13: mod_base = OTHER; note = 2'-O-methyluridine-3'-phosphate
  modified_base 14: mod_base = OTHER; note = 2'-O-methyluridine-3'-phosphate
  modified_base 15: mod_base = OTHER; note = 2'-O-methylcytidine-3'-phosphate
  modified_base 16: mod_base = OTHER; note = 2'-O-methyladenosine-3'-phosphate
  modified_base 17: mod_base = OTHER; note = 2'-O-methyluridine-3'-phosphate
  modified_base 18: mod_base = OTHER; note = 2'-O-methylguanosine-3'-phosphate
  modified_base 19: mod_base = OTHER; note = 2'-O-methyluridine-3'-phosphate
  modified_base 20: mod_base = OTHER; note = 2'-O-methyladenosine-3'-phosphate
  modified_base 21: mod_base = OTHER; note = 2'-O-methyluridine-3'-phosphate N-[tris(GalNAc-alkyl)-amidodecanoyl)]-4-hydroxyprolinol (Hyp-(GalNAc-alkyl)3)
tgccaagactccttcatgtat

SEQ ID NO: 592 - RNA, 21 nt, synthetic construct
  misc_feature 1..21: note = Description of Artificial Sequence: Synthetic oligonucleotide
  source 1..21: mol_type = other RNA
  modified_base 1: mod_base = OTHER; note = 2'-O-methyladenosine-3'-phosphorothioate
  modified_base 2: mod_base = OTHER; note = 2'-O-methyladenosine-3'-phosphorothioate
  modified_base 3: mod_base = OTHER; note = 2'-O-methylguanosine-3'-phosphate
  modified_base 4: mod_base = OTHER; note = 2'-O-methyladenosine-3'-phosphate
  modified_base 5: mod_base = OTHER; note = 2'-O-methylguanosine-3'-phosphate
  modified_base 6: mod_base = OTHER; note = 2'-O-methyladenosine-3'-phosphate
  modified_base 7: mod_base = OTHER; note = 2'-fluoroadenosine-3'-phosphate
  modified_base 8: mod_base = OTHER; note = 2'-O-methylguanosine-3'-phosphate
  modified_base 9: mod_base = OTHER; note = 2'-fluorouridine-3'-phosphate
  modified_base 10: mod_base = OTHER; note = 2'-fluorocytidine-3'-phosphate
  modified_base 11: mod_base = OTHER; note = 2'-fluoroguanosine-3'-phosphate
  modified_base 12: mod_base = OTHER; note = 2'-O-methyluridine-3'-phosphate
  modified_base 13: mod_base = OTHER; note = 2'-O-methyluridine-3'-phosphate
  modified_base 14: mod_base = OTHER; note = 2'-O-methyluridine-3'-phosphate
  modified_base 15: mod_base = OTHER; note = 2'-O-methylcytidine-3'-phosphate
  modified_base 16: mod_base = OTHER; note = 2'-O-methyladenosine-3'-phosphate
  modified_base 17: mod_base = OTHER; note = 2'-O-methyluridine-3'-phosphate
  modified_base 18: mod_base = OTHER; note = 2'-O-methyluridine-3'-phosphate
  modified_base 19: mod_base = OTHER; note = 2'-O-methylcytidine-3'-phosphate
  modified_base 20: mod_base = OTHER; note = 2'-O-methyladenosine-3'-phosphate
  modified_base 21: mod_base = OTHER; note = 2'-O-methyluridine-3'-phosphate N-[tris(GalNAc-alkyl)-amidodecanoyl)]-4-hydroxyprolinol (Hyp-(GalNAc-alkyl)3)
aagagaagtcgtttcattcat

SEQ ID NO: 593 - RNA, 21 nt, synthetic construct
  misc_feature 1..21: note = Description of Artificial Sequence: Synthetic oligonucleotide
  source 1..21: mol_type = other RNA
  modified_base 1: mod_base = OTHER; note = 2'-O-methyladenosine-3'-phosphorothioate
  modified_base 2: mod_base = OTHER; note = 2'-O-methylguanosine-3'-phosphorothioate
  modified_base 3: mod_base = OTHER; note = 2'-O-methyladenosine-3'-phosphate
  modified_base 4: mod_base = OTHER; note = 2'-O-methylguanosine-3'-phosphate
  modified_base 5: mod_base = OTHER; note = 2'-O-methyladenosine-3'-phosphate
  modified_base 6: mod_base = OTHER; note = 2'-O-methyladenosine-3'-phosphate
  modified_base 7: mod_base = OTHER; note = 2'-fluoroguanosine-3'-phosphate
  modified_base 8: mod_base = OTHER; note = 2'-O-methyluridine-3'-phosphate
  modified_base 9: mod_base = OTHER; note = 2'-fluorocytidine-3'-phosphate
  modified_base 10: mod_base = OTHER; note = 2'-fluoroguanosine-3'-phosphate
  modified_base 11: mod_base = OTHER; note = 2'-fluorouridine-3'-phosphate
  modified_base 12: mod_base = OTHER; note = 2'-O-methyluridine-3'-phosphate
  modified_base 13: mod_base = OTHER; note = 2'-O-methyluridine-3'-phosphate
  modified_base 14: mod_base = OTHER; note = 2'-O-methylcytidine-3'-phosphate
  modified_base 15: mod_base = OTHER; note = 2'-O-methyladenosine-3'-phosphate
  modified_base 16: mod_base = OTHER; note = 2'-O-methyluridine-3'-phosphate
  modified_base 17: mod_base = OTHER; note = 2'-O-methyluridine-3'-phosphate
  modified_base 18: mod_base = OTHER; note = 2'-O-methylcytidine-3'-phosphate
  modified_base 19: mod_base = OTHER; note = 2'-O-methyladenosine-3'-phosphate
  modified_base 20: mod_base = OTHER; note = 2'-O-methyladenosine-3'-phosphate
  modified_base 21: mod_base = OTHER; note = 2'-O-methyluridine-3'-phosphate N-[tris(GalNAc-alkyl)-amidodecanoyl)]-4-hydroxyprolinol (Hyp-(GalNAc-alkyl)3)
agagaagtcgtttcattcaat

SEQ ID NO: 594 - RNA, 21 nt, synthetic construct
  misc_feature 1..21: note = Description of Artificial Sequence: Synthetic oligonucleotide
  source 1..21: mol_type = other RNA
  modified_base 1: mod_base = OTHER; note = 2'-O-methyluridine-3'-phosphorothioate
  modified_base 2: mod_base = OTHER; note = 2'-O-methyladenosine-3'-phosphorothioate
  modified_base 3: mod_base = OTHER; note = 2'-O-methyluridine-3'-phosphate
  modified_base 4: mod_base = OTHER; note = 2'-O-methylguanosine-3'-phosphate
  modified_base 5: mod_base = OTHER; note = 2'-O-methyladenosine-3'-phosphate
  modified_base 6: mod_base = OTHER; note = 2'-O-methyladenosine-3'-phosphate
  modified_base 7: mod_base = OTHER; note = 2'-fluoroguanosine-3'-phosphate
  modified_base 8: mod_base = OTHER; note = 2'-O-methyladenosine-3'-phosphate
  modified_base 9: mod_base = OTHER; note = 2'-fluorocytidine-3'-phosphate
  modified_base 10: mod_base = OTHER; note = 2'-fluorocytidine-3'-phosphate
  modified_base 11: mod_base = OTHER; note = 2'-fluoroadenosine-3'-phosphate
  modified_base 12: mod_base = OTHER; note = 2'-O-methylcytidine-3'-phosphate
  modified_base 13: mod_base = OTHER; note = 2'-O-methyladenosine-3'-phosphate
  modified_base 14: mod_base = OTHER; note = 2'-O-methyladenosine-3'-phosphate
  modified_base 15: mod_base = OTHER; note = 2'-O-methylguanosine-3'-phosphate
  modified_base 16: mod_base = OTHER; note = 2'-O-methyluridine-3'-phosphate
  modified_base 17: mod_base = OTHER; note = 2'-O-methyluridine-3'-phosphate
  modified_base 18: mod_base = OTHER; note = 2'-O-methylguanosine-3'-phosphate
  modified_base 19: mod_base = OTHER; note = 2'-O-methyladenosine-3'-phosphate
  modified_base 20: mod_base = OTHER; note = 2'-O-methyladenosine-3'-phosphate
  modified_base 21: mod_base = OTHER; note = 2'-O-methyluridine-3'-phosphate N-[tris(GalNAc-alkyl)-amidodecanoyl)]-4-hydroxyprolinol (Hyp-(GalNAc-alkyl)3)
tatgaagaccacaagttgaat

SEQ ID NO: 595 - RNA, 21 nt, synthetic construct
  misc_feature 1..21: note = Description of Artificial Sequence: Synthetic oligonucleotide
  source 1..21: mol_type = other RNA
  modified_base 1: mod_base = OTHER; note = 2'-O-methylcytidine-3'-phosphorothioate
  modified_base 2: mod_base = OTHER; note = 2'-O-methylguanosine-3'-phosphorothioate
  modified_base 3: mod_base = OTHER; note = 2'-O-methylguanosine-3'-phosphate
  modified_base 4: mod_base = OTHER; note = 2'-O-methyladenosine-3'-phosphate
  modified_base 5: mod_base = OTHER; note = 2'-O-methyladenosine-3'-phosphate
  modified_base 6: mod_base = OTHER; note = 2'-O-methylguanosine-3'-phosphate
  modified_base 7: mod_base = OTHER; note = 2'-fluoroguanosine-3'-phosphate
  modified_base 8: mod_base = OTHER; note = 2'-O-methyladenosine-3'-phosphate
  modified_base 9: mod_base = OTHER; note = 2'-fluoroguanosine-3'-phosphate
  modified_base 10: mod_base = OTHER; note = 2'-fluoroguanosine-3'-phosphate
  modified_base 11: mod_base = OTHER; note = 2'-fluorouridine-3'-phosphate
  modified_base 12: mod_base = OTHER; note = 2'-O-methylcytidine-3'-phosphate
  modified_base 13: mod_base = OTHER; note = 2'-O-methyluridine-3'-phosphate
  modified_base 14: mod_base = OTHER; note = 2'-O-methyladenosine-3'-phosphate
  modified_base 15: mod_base = OTHER; note = 2'-O-methylcytidine-3'-phosphate
  modified_base 16: mod_base = OTHER; note = 2'-O-methyladenosine-3'-phosphate
  modified_base 17: mod_base = OTHER; note = 2'-O-methyluridine-3'-phosphate
  modified_base 18: mod_base = OTHER; note = 2'-O-methylcytidine-3'-phosphate
  modified_base 19: mod_base = OTHER; note = 2'-O-methyladenosine-3'-phosphate
  modified_base 20: mod_base = OTHER; note = 2'-O-methyladenosine-3'-phosphate
  modified_base 21: mod_base = OTHER; note = 2'-O-methyluridine-3'-phosphate N-[tris(GalNAc-alkyl)-amidodecanoyl)]-4-hydroxyprolinol (Hyp-(GalNAc-alkyl)3)
cggaaggaggtctacatcaat

SEQ ID NO: 596 - RNA, 21 nt, synthetic construct
  misc_feature 1..21: note = Description of Artificial Sequence: Synthetic oligonucleotide
  source 1..21: mol_type = other RNA
  modified_base 1: mod_base = OTHER; note = 2'-O-methyladenosine-3'-phosphorothioate
  modified_base 2: mod_base = OTHER; note = 2'-O-methyluridine-3'-phosphorothioate
  modified_base 3: mod_base = OTHER; note = 2'-O-methylcytidine-3'-phosphate
  modified_base 4: mod_base = OTHER; note = 2'-O-methyladenosine-3'-phosphate
  modified_base 5: mod_base = OTHER; note = 2'-O-methyladenosine-3'-phosphate
  modified_base 6: mod_base = OTHER; note = 2'-O-methylguanosine-3'-phosphate
  modified_base 7: mod_base = OTHER; note = 2'-fluorocytidine-3'-phosphate
  modified_base 8: mod_base = OTHER; note = 2'-O-methyluridine-3'-phosphate
  modified_base 9: mod_base = OTHER; note = 2'-fluorocytidine-3'-phosphate
  modified_base 10: mod_base = OTHER; note = 2'-fluoroadenosine-3'-phosphate
  modified_base 11: mod_base = OTHER; note = 2'-fluoroadenosine-3'-phosphate
  modified_base 12: mod_base = OTHER; note = 2'-O-methylguanosine-3'-phosphate
  modified_base 13: mod_base = OTHER; note = 2'-O-methyladenosine-3'-phosphate
  modified_base 14: mod_base = OTHER; note = 2'-O-methyladenosine-3'-phosphate
  modified_base 15: mod_base = OTHER; note = 2'-O-methyluridine-3'-phosphate
  modified_base 16: mod_base = OTHER; note = 2'-O-methyladenosine-3'-phosphate
  modified_base 17: mod_base = OTHER; note = 2'-O-methyladenosine-3'-phosphate
  modified_base 18: mod_base = OTHER; note = 2'-O-methylguanosine-3'-phosphate
  modified_base 19: mod_base = OTHER; note = 2'-O-methylcytidine-3'-phosphate
  modified_base 20: mod_base = OTHER; note = 2'-O-methyluridine-3'-phosphate
  modified_base 21: mod_base = OTHER; note = 2'-O-methyluridine-3'-phosphate N-[tris(GalNAc-alkyl)-amidodecanoyl)]-4-hydroxyprolinol (Hyp-(GalNAc-alkyl)3)
atcaagctcaagaataagctt

SEQ ID NO: 597 - RNA, 21 nt, synthetic construct
  misc_feature 1..21: note = Description of Artificial Sequence: Synthetic oligonucleotide
  source 1..21: mol_type = other RNA
  modified_base 1: mod_base = OTHER; note = 2'-O-methylcytidine-3'-phosphorothioate
  modified_base 2: mod_base = OTHER; note = 2'-O-methyladenosine-3'-phosphorothioate
  modified_base 3: mod_base = OTHER; note = 2'-O-methyladenosine-3'-phosphate
  modified_base 4: mod_base = OTHER; note = 2'-O-methylguanosine-3'-phosphate
  modified_base 5: mod_base = OTHER; note = 2'-O-methyladenosine-3'-phosphate
  modified_base 6: mod_base = OTHER; note = 2'-O-methylguanosine-3'-phosphate
  modified_base 7: mod_base = OTHER; note = 2'-fluoroadenosine-3'-phosphate
  modified_base 8: mod_base = OTHER; note = 2'-O-methyladenosine-3'-phosphate
  modified_base 9: mod_base = OTHER; note = 2'-fluoroguanosine-3'-phosphate
  modified_base 10: mod_base = OTHER; note = 2'-fluorouridine-3'-phosphate
  modified_base 11: mod_base = OTHER; note = 2'-fluorocytidine-3'-phosphate
  modified_base 12: mod_base = OTHER; note = 2'-O-methylguanosine-3'-phosphate
  modified_base 13: mod_base = OTHER; note = 2'-O-methyluridine-3'-phosphate
  modified_base 14: mod_base = OTHER; note = 2'-O-methyluridine-3'-phosphate
  modified_base 15: mod_base = OTHER; note = 2'-O-methyluridine-3'-phosphate
  modified_base 16: mod_base = OTHER; note = 2'-O-methylcytidine-3'-phosphate
  modified_base 17: mod_base = OTHER; note = 2'-O-methyladenosine-3'-phosphate
  modified_base 18: mod_base = OTHER; note = 2'-O-methyluridine-3'-phosphate
  modified_base 19: mod_base = OTHER; note = 2'-O-methyluridine-3'-phosphate
  modified_base 20: mod_base = OTHER; note = 2'-O-methylcytidine-3'-phosphate
  modified_base 21: mod_base = OTHER; note = 2'-O-methyluridine-3'-phosphate N-[tris(GalNAc-alkyl)-amidodecanoyl)]-4-hydroxyprolinol (Hyp-(GalNAc-alkyl)3)
caagagaagtcgtttcattct

SEQ ID NO: 598 - RNA, 21 nt, synthetic construct
  misc_feature 1..21: note = Description of Artificial Sequence: Synthetic oligonucleotide
  source 1..21: mol_type = other RNA
  modified_base 1: mod_base = OTHER; note = 2'-O-methylcytidine-3'-phosphorothioate
  modified_base 2: mod_base = OTHER; note = 2'-O-methyluridine-3'-phosphorothioate
  modified_base 3: mod_base = OTHER; note = 2'-O-methylguanosine-3'-phosphate
  modified_base 4: mod_base = OTHER; note = 2'-O-methyluridine-3'-phosphate
  modified_base 5: mod_base = OTHER; note = 2'-O-methylguanosine-3'-phosphate
  modified_base 6: mod_base = OTHER; note = 2'-O-methylguanosine-3'-phosphate
  modified_base 7: mod_base = OTHER; note = 2'-fluorouridine-3'-phosphate
  modified_base 8: mod_base = OTHER; note = 2'-O-methylguanosine-3'-phosphate
  modified_base 9: mod_base = OTHER; note = 2'-fluorouridine-3'-phosphate
  modified_base 10: mod_base = OTHER; note = 2'-fluorocytidine-3'-phosphate
  modified_base 11: mod_base = OTHER; note = 2'-fluorouridine-3'-phosphate
  modified_base 12: mod_base = OTHER; note = 2'-O-methylguanosine-3'-phosphate
  modified_base 13: mod_base = OTHER; note = 2'-O-methyladenosine-3'-phosphate
  modified_base 14: mod_base = OTHER; note = 2'-O-methylguanosine-3'-phosphate
  modified_base 15: mod_base = OTHER; note = 2'-O-methyluridine-3'-phosphate
  modified_base 16: mod_base = OTHER; note = 2'-O-methyladenosine-3'-phosphate
  modified_base 17: mod_base = OTHER; note = 2'-O-methylcytidine-3'-phosphate
  modified_base 18: mod_base = OTHER; note = 2'-O-methyluridine-3'-phosphate
  modified_base 19: mod_base = OTHER; note = 2'-O-methyluridine-3'-phosphate
  modified_base 20: mod_base = OTHER; note = 2'-O-methyluridine-3'-phosphate
  modified_base 21: mod_base = OTHER; note = 2'-O-methyluridine-3'-phosphate N-[tris(GalNAc-alkyl)-amidodecanoyl)]-4-hydroxyprolinol (Hyp-(GalNAc-alkyl)3)
ctgtggtgtctgagtactttt

SEQ ID NO: 599 - RNA, 21 nt, synthetic construct
  misc_feature 1..21: note = Description of Artificial Sequence: Synthetic oligonucleotide
  source 1..21: mol_type = other RNA
  modified_base 1: mod_base = OTHER; note = 2'-O-methyladenosine-3'-phosphorothioate
  modified_base 2: mod_base = OTHER; note = 2'-O-methyluridine-3'-phosphorothioate
  modified_base 3: mod_base = OTHER; note = 2'-O-methylguanosine-3'-phosphate
  modified_base 4: mod_base = OTHER; note = 2'-O-methyladenosine-3'-phosphate
  modified_base 5: mod_base = OTHER; note = 2'-O-methylguanosine-3'-phosphate
  modified_base 6: mod_base = OTHER; note = 2'-O-methylcytidine-3'-phosphate
  modified_base 7: mod_base = OTHER; note = 2'-fluoroadenosine-3'-phosphate
  modified_base 8: mod_base = OTHER; note = 2'-O-methyladenosine-3'-phosphate
  modified_base 9: mod_base = OTHER; note = 2'-fluorocytidine-3'-phosphate
  modified_base 10: mod_base = OTHER; note = 2'-fluoroadenosine-3'-phosphate
  modified_base 11: mod_base = OTHER; note = 2'-fluorouridine-3'-phosphate
  modified_base 12: mod_base = OTHER; note = 2'-O-methylguanosine-3'-phosphate
  modified_base 13: mod_base = OTHER; note = 2'-O-methyluridine-3'-phosphate
  modified_base 14: mod_base = OTHER; note = 2'-O-methylguanosine-3'-phosphate
  modified_base 15: mod_base = OTHER; note = 2'-O-methyluridine-3'-phosphate
  modified_base 16: mod_base = OTHER; note = 2'-O-methyluridine-3'-phosphate
  modified_base 17: mod_base = OTHER; note = 2'-O-methylcytidine-3'-phosphate
  modified_base 18: mod_base = OTHER; note = 2'-O-methyladenosine-3'-phosphate
  modified_base 19: mod_base = OTHER; note = 2'-O-methyladenosine-3'-phosphate
  modified_base 20: mod_base = OTHER; note = 2'-O-methyladenosine-3'-phosphate
  modified_base 21: mod_base = OTHER; note = 2'-O-methyluridine-3'-phosphate N-[tris(GalNAc-alkyl)-amidodecanoyl)]-4-hydroxyprolinol (Hyp-(GalNAc-alkyl)3)
atgagcaacatgtgttcaaat

SEQ ID NO: 600 - RNA, 21 nt, synthetic construct
  misc_feature 1..21: note = Description of Artificial Sequence: Synthetic oligonucleotide
  source 1..21: mol_type = other RNA
  modified_base 1: mod_base = OTHER; note = 2'-O-methyladenosine-3'-phosphorothioate
  modified_base 2: mod_base = OTHER; note = 2'-O-methylcytidine-3'-phosphorothioate
  modified_base 3: mod_base = OTHER; note = 2'-O-methyladenosine-3'-phosphate
  modified_base 4: mod_base = OTHER; note = 2'-O-methyladenosine-3'-phosphate
  modified_base 5: mod_base = OTHER; note = 2'-O-methylguanosine-3'-phosphate
  modified_base 6: mod_base = OTHER; note = 2'-O-methyladenosine-3'-phosphate
  modified_base 7: mod_base = OTHER; note = 2'-fluoroguanosine-3'-phosphate
  modified_base 8: mod_base = OTHER; note = 2'-O-methyladenosine-3'-phosphate
  modified_base 9: mod_base = OTHER; note = 2'-fluoroadenosine-3'-phosphate
  modified_base 10: mod_base = OTHER; note = 2'-fluoroguanosine-3'-phosphate
  modified_base 11: mod_base = OTHER; note = 2'-fluorouridine-3'-phosphate
  modified_base 12: mod_base = OTHER; note = 2'-O-methylcytidine-3'-phosphate
  modified_base 13: mod_base = OTHER; note = 2'-O-methylguanosine-3'-phosphate
  modified_base 14: mod_base = OTHER; note = 2'-O-methyluridine-3'-phosphate
  modified_base 15: mod_base = OTHER; note = 2'-O-methyluridine-3'-phosphate
  modified_base 16: mod_base = OTHER; note = 2'-O-methyluridine-3'-phosphate
  modified_base 17: mod_base = OTHER; note = 2'-O-methylcytidine-3'-phosphate
  modified_base 18: mod_base = OTHER; note = 2'-O-methyladenosine-3'-phosphate
  modified_base 19: mod_base = OTHER; note = 2'-O-methyluridine-3'-phosphate
  modified_base 20: mod_base = OTHER; note = 2'-O-methyluridine-3'-phosphate
  modified_base 21: mod_base = OTHER; note = 2'-O-methyluridine-3'-phosphate N-[tris(GalNAc-alkyl)-amidodecanoyl)]-4-hydroxyprolinol (Hyp-(GalNAc-alkyl)3)
acaagagaagtcgtttcattt

SEQ ID NO: 601 - RNA, 21 nt, synthetic construct
  misc_feature 1..21: note = Description of Artificial Sequence: Synthetic oligonucleotide
  source 1..21: mol_type = other RNA
  modified_base 1: mod_base = OTHER; note = 2'-O-methylcytidine-3'-phosphorothioate
  modified_base 2: mod_base = OTHER; note = 2'-O-methyladenosine-3'-phosphorothioate
  modified_base 3: mod_base = OTHER; note = 2'-O-methyladenosine-3'-phosphate
  modified_base 4: mod_base = OTHER; note = 2'-O-methyladenosine-3'-phosphate
  modified_base 5: mod_base = OTHER; note = 2'-O-methylguanosine-3'-phosphate
  modified_base 6: mod_base = OTHER; note = 2'-O-methyluridine-3'-phosphate
  modified_base 7: mod_base = OTHER; note = 2'-fluorocytidine-3'-phosphate
  modified_base 8: mod_base = OTHER; note = 2'-O-methyladenosine-3'-phosphate
  modified_base 9: mod_base = OTHER; note = 2'-fluoroadenosine-3'-phosphate
  modified_base 10: mod_base = OTHER; note = 2'-fluoroguanosine-3'-phosphate
  modified_base 11: mod_base = OTHER; note = 2'-fluoroguanosine-3'-phosphate
  modified_base 12: mod_base = OTHER; note = 2'-O-methyladenosine-3'-phosphate
  modified_base 13: mod_base = OTHER; note = 2'-O-methyluridine-3'-phosphate
  modified_base 14: mod_base = OTHER; note = 2'-O-methyladenosine-3'-phosphate
  modified_base 15: mod_base = OTHER; note = 2'-O-methyluridine-3'-phosphate
  modified_base 16: mod_base = OTHER; note = 2'-O-methylguanosine-3'-phosphate
  modified_base 17: mod_base = OTHER; note = 2'-O-methylguanosine-3'-phosphate
  modified_base 18: mod_base = OTHER; note = 2'-O-methyladenosine-3'-phosphate
  modified_base 19: mod_base = OTHER; note = 2'-O-methyladenosine-3'-phosphate
  modified_base 20: mod_base = OTHER; note = 2'-O-methyladenosine-3'-phosphate
  modified_base 21: mod_base = OTHER; note = 2'-O-methyluridine-3'-phosphate N-[tris(GalNAc-alkyl)-amidodecanoyl)]-4-hydroxyprolinol (Hyp-(GalNAc-alkyl)3)
caaagtcaaggatatggaaat

SEQ ID NO: 602 - RNA, 21 nt, synthetic construct
  misc_feature 1..21: note = Description of Artificial Sequence: Synthetic oligonucleotide
  source 1..21: mol_type = other RNA
  modified_base 1: mod_base = OTHER; note = 2'-O-methyluridine-3'-phosphorothioate
  modified_base 2: mod_base = OTHER; note = 2'-O-methylguanosine-3'-phosphorothioate
  modified_base 3: mod_base = OTHER; note = 2'-O-methylguanosine-3'-phosphate
  modified_base 4: mod_base = OTHER; note = 2'-O-methyluridine-3'-phosphate
  modified_base 5: mod_base = OTHER; note = 2'-O-methylguanosine-3'-phosphate
  modified_base 6: mod_base = OTHER; note = 2'-O-methyluridine-3'-phosphate
  modified_base 7: mod_base = OTHER; note = 2'-fluorocytidine-3'-phosphate
  modified_base 8: mod_base = OTHER; note = 2'-O-methyluridine-3'-phosphate
  modified_base 9: mod_base = OTHER; note = 2'-fluoroguanosine-3'-phosphate
  modified_base 10: mod_base = OTHER; note = 2'-fluoroadenosine-3'-phosphate
  modified_base 11: mod_base = OTHER; note = 2'-fluoroguanosine-3'-phosphate
  modified_base 12: mod_base = OTHER; note = 2'-O-methyluridine-3'-phosphate
  modified_base 13: mod_base = OTHER; note = 2'-O-methyladenosine-3'-phosphate
  modified_base 14: mod_base = OTHER; note = 2'-O-methylcytidine-3'-phosphate
  modified_base 15: mod_base = OTHER; note = 2'-O-methyluridine-3'-phosphate
  modified_base 16: mod_base = OTHER; note = 2'-O-methyluridine-3'-phosphate
  modified_base 17: mod_base = OTHER; note = 2'-O-methyluridine-3'-phosphate
  modified_base 18: mod_base = OTHER; note = 2'-O-methylguanosine-3'-phosphate
  modified_base 19: mod_base = OTHER; note = 2'-O-methyluridine-3'-phosphate
  modified_base 20: mod_base = OTHER; note = 2'-O-methylguanosine-3'-phosphate
  modified_base 21: mod_base = OTHER; note = 2'-O-methyluridine-3'-phosphate N-[tris(GalNAc-alkyl)-amidodecanoyl)]-4-hydroxyprolinol (Hyp-(GalNAc-alkyl)3)
tggtgtctgagtactttgtgt

SEQ ID NO: 603 - RNA, 21 nt, synthetic construct
  misc_feature 1..21: note = Description of Artificial Sequence: Synthetic oligonucleotide
  source 1..21: mol_type = other RNA
  modified_base 1: mod_base = OTHER; note = 2'-O-methyladenosine-3'-phosphorothioate
  modified_base 2: mod_base = OTHER; note = 2'-O-methylguanosine-3'-phosphorothioate
  modified_base 3: mod_base = OTHER; note = 2'-O-methyladenosine-3'-phosphate
  modified_base 4: mod_base = OTHER; note = 2'-O-methyladenosine-3'-phosphate
  modified_base 5: mod_base = OTHER; note = 2'-O-methylguanosine-3'-phosphate
  modified_base 6: mod_base = OTHER; note = 2'-O-methyluridine-3'-phosphate
  modified_base 7: mod_base = OTHER; note = 2'-fluorocytidine-3'-phosphate
  modified_base 8: mod_base = OTHER; note = 2'-O-methylguanosine-3'-phosphate
  modified_base 9: mod_base = OTHER; note = 2'-fluorouridine-3'-phosphate
  modified_base 10: mod_base = OTHER; note = 2'-fluorouridine-3'-phosphate
  modified_base 11: mod_base = OTHER; note = 2'-fluorouridine-3'-phosphate
  modified_base 12: mod_base = OTHER; note = 2'-O-methylcytidine-3'-phosphate
  modified_base 13: mod_base = OTHER; note = 2'-O-methyladenosine-3'-phosphate
  modified_base 14: mod_base = OTHER; note = 2'-O-methyluridine-3'-phosphate
  modified_base 15: mod_base = OTHER; note = 2'-O-methyluridine-3'-phosphate
  modified_base 16: mod_base = OTHER; note = 2'-O-methylcytidine-3'-phosphate
  modified_base 17: mod_base = OTHER; note = 2'-O-methyladenosine-3'-phosphate
  modified_base 18: mod_base = OTHER; note = 2'-O-methyladenosine-3'-phosphate
  modified_base 19: mod_base = OTHER; note = 2'-O-methylguanosine-3'-phosphate
  modified_base 20: mod_base = OTHER; note = 2'-O-methyluridine-3'-phosphate
  modified_base 21: mod_base = OTHER; note = 2'-O-methyluridine-3'-phosphate N-[tris(GalNAc-alkyl)-amidodecanoyl)]-4-hydroxyprolinol (Hyp-(GalNAc-alkyl)3)
agaagtcgtttcattcaagtt

SEQ ID NO: 604 - RNA, 21 nt, synthetic construct
  misc_feature 1..21: note = Description of Artificial Sequence: Synthetic oligonucleotide
  source 1..21: mol_type = other RNA
  modified_base 1: mod_base = OTHER; note = 2'-O-methyluridine-3'-phosphorothioate
  modified_base 2: mod_base = OTHER; note = 2'-O-methyluridine-3'-phosphorothioate
  modified_base 3: mod_base = OTHER; note = 2'-O-methylcytidine-3'-phosphate
  modified_base 4: mod_base = OTHER; note = 2'-O-methyladenosine-3'-phosphate
  modified_base 5: mod_base = OTHER; note = 2'-O-methyladenosine-3'-phosphate
  modified_base 6: mod_base = OTHER; note = 2'-O-methyladenosine-3'-phosphate
  modified_base 7: mod_base = OTHER; note = 2'-fluoroguanosine-3'-phosphate
  modified_base 8: mod_base = OTHER; note = 2'-O-methyluridine-3'-phosphate
  modified_base 9: mod_base = OTHER; note = 2'-fluorocytidine-3'-phosphate
  modified_base 10: mod_base = OTHER; note = 2'-fluoroadenosine-3'-phosphate
  modified_base 11: mod_base = OTHER; note = 2'-fluoroadenosine-3'-phosphate
  modified_base 12: mod_base = OTHER; note = 2'-O-methylguanosine-3'-phosphate
  modified_base 13: mod_base = OTHER; note = 2'-O-methylguanosine-3'-phosphate
  modified_base 14: mod_base = OTHER; note = 2'-O-methyladenosine-3'-phosphate
  modified_base 15: mod_base = OTHER; note = 2'-O-methyluridine-3'-phosphate
  modified_base 16: mod_base = OTHER; note = 2'-O-methyladenosine-3'-phosphate
  modified_base 17: mod_base = OTHER; note = 2'-O-methyluridine-3'-phosphate
  modified_base 18: mod_base = OTHER; note = 2'-O-methylguanosine-3'-phosphate
  modified_base 19: mod_base = OTHER; note = 2'-O-methylguanosine-3'-phosphate
  modified_base 20: mod_base = OTHER; note = 2'-O-methyladenosine-3'-phosphate
  modified_base 21: mod_base = OTHER; note = 2'-O-methyluridine-3'-phosphate N-[tris(GalNAc-alkyl)-amidodecanoyl)]-4-hydroxyprolinol (Hyp-(GalNAc-alkyl)3)
ttcaaagtcaaggatatggat

SEQ ID NO: 605 - RNA, 21 nt, synthetic construct
  misc_feature 1..21: note = Description of Artificial Sequence: Synthetic oligonucleotide
  source 1..21: mol_type = other RNA
  modified_base 1: mod_base = OTHER; note = 2'-O-methyluridine-3'-phosphorothioate
  modified_base 2: mod_base = OTHER; note = 2'-O-methylcytidine-3'-phosphorothioate
  modified_base 3: mod_base = OTHER; note = 2'-O-methyladenosine-3'-phosphate
  modified_base 4: mod_base = OTHER; note = 2'-O-methyladenosine-3'-phosphate
  modified_base 5: mod_base = OTHER; note = 2'-O-methyladenosine-3'-phosphate
  modified_base 6: mod_base = OTHER; note = 2'-O-methylguanosine-3'-phosphate
  modified_base 7: mod_base = OTHER; note = 2'-fluorouridine-3'-phosphate
  modified_base 8: mod_base = OTHER; note = 2'-O-methylcytidine-3'-phosphate
  modified_base 9: mod_base = OTHER; note = 2'-fluoroadenosine-3'-phosphate
  modified_base 10: mod_base = OTHER; note = 2'-fluoroadenosine-3'-phosphate
  modified_base 11: mod_base = OTHER; note = 2'-fluoroguanosine-3'-phosphate
  modified_base 12: mod_base = OTHER; note = 2'-O-methylguanosine-3'-phosphate
  modified_base 13: mod_base = OTHER; note = 2'-O-methyladenosine-3'-phosphate
  modified_base 14: mod_base = OTHER; note = 2'-O-methyluridine-3'-phosphate
  modified_base 15: mod_base = OTHER; note = 2'-O-methyladenosine-3'-phosphate
  modified_base 16: mod_base = OTHER; note = 2'-O-methyluridine-3'-phosphate
  modified_base 17: mod_base = OTHER; note = 2'-O-methylguanosine-3'-phosphate
  modified_base 18: mod_base = OTHER; note = 2'-O-methylguanosine-3'-phosphate
  modified_base 19: mod_base = OTHER; note = 2'-O-methyladenosine-3'-phosphate
  modified_base 20: mod_base = OTHER; note = 2'-O-methyladenosine-3'-phosphate
  modified_base 21: mod_base = OTHER; note = 2'-O-methyluridine-3'-phosphate N-[tris(GalNAc-alkyl)-amidodecanoyl)]-4-hydroxyprolinol (Hyp-(GalNAc-alkyl)3)
tcaaagtcaaggatatggaat

SEQ ID NO: 606 - RNA, 21 nt, synthetic construct
  misc_feature 1..21: note = Description of Artificial Sequence: Synthetic oligonucleotide
  source 1..21: mol_type = other RNA
  modified_base 1: mod_base = OTHER; note = 2'-O-methyladenosine-3'-phosphorothioate
  modified_base 2: mod_base = OTHER; note = 2'-O-methylguanosine-3'-phosphorothioate
  modified_base 3: mod_base = OTHER; note = 2'-O-methylguanosine-3'-phosphate
  modified_base 4: mod_base = OTHER; note = 2'-O-methyladenosine-3'-phosphate
  modified_base 5: mod_base = OTHER; note = 2'-O-methylguanosine-3'-phosphate
  modified_base 6: mod_base = OTHER; note = 2'-O-methylguanosine-3'-phosphate
  modified_base 7: mod_base = OTHER; note = 2'-fluorouridine-3'-phosphate
  modified_base 8: mod_base = OTHER; note = 2'-O-methylcytidine-3'-phosphate
  modified_base 9: mod_base = OTHER; note = 2'-fluorouridine-3'-phosphate
  modified_base 10: mod_base = OTHER; note = 2'-fluoroadenosine-3'-phosphate
  modified_base 11: mod_base = OTHER; note = 2'-fluorocytidine-3'-phosphate
  modified_base 12: mod_base = OTHER; note = 2'-O-methyladenosine-3'-phosphate
  modified_base 13: mod_base = OTHER; note = 2'-O-methyluridine-3'-phosphate
  modified_base 14: mod_base = OTHER; note = 2'-O-methylcytidine-3'-phosphate
  modified_base 15: mod_base = OTHER; note = 2'-O-methyladenosine-3'-phosphate
  modified_base 16: mod_base = OTHER; note = 2'-O-methyladenosine-3'-phosphate
  modified_base 17: mod_base = OTHER; note = 2'-O-methylguanosine-3'-phosphate
  modified_base 18: mod_base = OTHER; note = 2'-O-methyladenosine-3'-phosphate
  modified_base 19: mod_base = OTHER; note = 2'-O-methyladenosine-3'-phosphate
  modified_base 20: mod_base = OTHER; note = 2'-O-methyluridine-3'-phosphate
  modified_base 21: mod_base = OTHER; note = 2'-O-methyluridine-3'-phosphate N-[tris(GalNAc-alkyl)-amidodecanoyl)]-4-hydroxyprolinol (Hyp-(GalNAc-alkyl)3)
aggaggtctacatcaagaatt

SEQ ID NO: 607 - RNA, 21 nt, synthetic construct
  misc_feature 1..21: note = Description of Artificial Sequence: Synthetic oligonucleotide
  source 1..21: mol_type = other RNA
  modified_base 1: mod_base = OTHER; note = 2'-O-methylcytidine-3'-phosphorothioate
  modified_base 2: mod_base = OTHER; note = 2'-O-methyladenosine-3'-phosphorothioate
  modified_base 3: mod_base = OTHER; note = 2'-O-methyladenosine-3'-phosphate
  modified_base 4: mod_base = OTHER; note = 2'-O-methylcytidine-3'-phosphate
  modified_base 5: mod_base = OTHER; note = 2'-O-methyladenosine-3'-phosphate
  modified_base 6: mod_base = OTHER; note = 2'-O-methyluridine-3'-phosphate
  modified_base 7: mod_base = OTHER; note = 2'-fluoroguanosine-3'-phosphate
  modified_base 8: mod_base = OTHER; note = 2'-O-methyluridine-3'-phosphate
  modified_base 9: mod_base = OTHER; note = 2'-fluoroguanosine-3'-phosphate
  modified_base 10: mod_base = OTHER; note = 2'-fluorouridine-3'-phosphate
  modified_base 11: mod_base = OTHER; note = 2'-fluorouridine-3'-phosphate
  modified_base 12: mod_base = OTHER; note = 2'-O-methylcytidine-3'-phosphate
  modified_base 13: mod_base = OTHER; note = 2'-O-methyladenosine-3'-phosphate
  modified_base 14: mod_base = OTHER; note = 2'-O-methyladenosine-3'-phosphate
  modified_base 15: mod_base = OTHER; note = 2'-O-methyladenosine-3'-phosphate
  modified_base 16: mod_base = OTHER; note = 2'-O-methylguanosine-3'-phosphate
  modified_base 17: mod_base = OTHER; note = 2'-O-methyluridine-3'-phosphate
  modified_base 18: mod_base = OTHER; note = 2'-O-methylcytidine-3'-phosphate
  modified_base 19: mod_base = OTHER; note = 2'-O-methyladenosine-3'-phosphate
  modified_base 20: mod_base = OTHER; note = 2'-O-methyladenosine-3'-phosphate
  modified_base 21: mod_base = OTHER; note = 2'-O-methyluridine-3'-phosphate N-[tris(GalNAc-alkyl)-amidodecanoyl)]-4-hydroxyprolinol (Hyp-(GalNAc-alkyl)3)
caacatgtgttcaaagtcaat

SEQ ID NO: 608 - RNA, 21 nt, synthetic construct
  misc_feature 1..21: note = Description of Artificial Sequence: Synthetic oligonucleotide
  source 1..21: mol_type = other RNA
  modified_base 1: mod_base = OTHER; note = 2'-O-methyladenosine-3'-phosphorothioate
  modified_base 2: mod_base = OTHER; note = 2'-O-methylcytidine-3'-phosphorothioate
  modified_base 3: mod_base = OTHER; note = 2'-O-methyluridine-3'-phosphate
  modified_base 4: mod_base = OTHER; note = 2'-O-methyladenosine-3'-phosphate
  modified_base 5: mod_base = OTHER; note = 2'-O-methyluridine-3'-phosphate
  modified_base 6: mod_base = OTHER; note = 2'-O-methylcytidine-3'-phosphate
  modified_base 7: mod_base = OTHER; note = 2'-fluoroadenosine-3'-phosphate
  modified_base 8: mod_base = OTHER; note = 2'-O-methylguanosine-3'-phosphate
  modified_base 9: mod_base = OTHER; note = 2'-fluoroguanosine-3'-phosphate
  modified_base 10: mod_base = OTHER; note = 2'-fluorocytidine-3'-phosphate
  modified_base 11: mod_base = OTHER; note = 2'-fluorocytidine-3'-phosphate
  modified_base 12: mod_base = OTHER; note = 2'-O-methylcytidine-3'-phosphate
  modified_base 13: mod_base = OTHER; note = 2'-O-methyladenosine-3'-phosphate
  modified_base 14: mod_base = OTHER; note = 2'-O-methyluridine-3'-phosphate
  modified_base 15: mod_base = OTHER; note = 2'-O-methyluridine-3'-phosphate
  modified_base 16: mod_base = OTHER; note = 2'-O-methyluridine-3'-phosphate
  modified_base 17: mod_base = OTHER; note = 2'-O-methylguanosine-3'-phosphate
  modified_base 18: mod_base = OTHER; note = 2'-O-methyluridine-3'-phosphate
  modified_base 19: mod_base = OTHER; note = 2'-O-methylcytidine-3'-phosphate
  modified_base 20: mod_base = OTHER; note = 2'-O-methyluridine-3'-phosphate
  modified_base 21: mod_base = OTHER; note = 2'-O-methyluridine-3'-phosphate N-[tris(GalNAc-alkyl)-amidodecanoyl)]-4-hydroxyprolinol (Hyp-(GalNAc-alkyl)3)
actatcaggcccatttgtctt

SEQ ID NO: 609 - RNA, 21 nt, synthetic construct
  misc_feature 1..21: note = Description of Artificial Sequence: Synthetic oligonucleotide
  source 1..21: mol_type = other RNA
  modified_base 1: mod_base = OTHER; note = 2'-O-methylguanosine-3'-phosphorothioate
  modified_base 2: mod_base = OTHER; note = 2'-O-methyladenosine-3'-phosphorothioate
  modified_base 3: mod_base = OTHER; note = 2'-O-methylguanosine-3'-phosphate
  modified_base 4: mod_base = OTHER; note = 2'-O-methylcytidine-3'-phosphate
  modified_base 5: mod_base = OTHER; note = 2'-O-methyladenosine-3'-phosphate
  modified_base 6: mod_base = OTHER; note = 2'-O-methyladenosine-3'-phosphate
  modified_base 7: mod_base = OTHER; note = 2'-fluorocytidine-3'-phosphate
  modified_base 8: mod_base = OTHER; note = 2'-O-methyladenosine-3'-phosphate
  modified_base 9: mod_base = OTHER; note = 2'-fluorouridine-3'-phosphate
  modified_base 10: mod_base = OTHER; note = 2'-fluoroguanosine-3'-phosphate
  modified_base 11: mod_base = OTHER; note = 2'-fluorouridine-3'-phosphate
  modified_base 12: mod_base = OTHER; note = 2'-O-methylguanosine-3'-phosphate
  modified_base 13: mod_base = OTHER; note = 2'-O-methyluridine-3'-phosphate
  modified_base 14: mod_base = OTHER; note = 2'-O-methyluridine-3'-phosphate
  modified_base 15: mod_base = OTHER; note = 2'-O-methylcytidine-3'-phosphate
  modified_base 16: mod_base = OTHER; note = 2'-O-methyladenosine-3'-phosphate
  modified_base 17: mod_base = OTHER; note = 2'-O-methyladenosine-3'-phosphate
  modified_base 18: mod_base = OTHER; note = 2'-O-methyladenosine-3'-phosphate
  modified_base 19: mod_base = OTHER; note = 2'-O-methylguanosine-3'-phosphate
  modified_base 20: mod_base = OTHER; note = 2'-O-methyluridine-3'-phosphate
  modified_base 21: mod_base = OTHER; note = 2'-O-methyluridine-3'-phosphate N-[tris(GalNAc-alkyl)-amidodecanoyl)]-4-hydroxyprolinol (Hyp-(GalNAc-alkyl)3)
gagcaacatgtgttcaaagtt

SEQ ID NO: 610 - RNA, 21 nt, synthetic construct
  misc_feature 1..21: note = Description of Artificial Sequence: Synthetic oligonucleotide
  source 1..21: mol_type = other RNA
  modified_base 1: mod_base = OTHER; note = 2'-O-methyladenosine-3'-phosphorothioate
  modified_base 2: mod_base = OTHER; note = 2'-O-methylguanosine-3'-phosphorothioate
  modified_base 3: mod_base = OTHER; note = 2'-O-methylguanosine-3'-phosphate
  modified_base 4: mod_base = OTHER; note = 2'-O-methyladenosine-3'-phosphate
  modified_base 5: mod_base = OTHER; note = 2'-O-methyluridine-3'-phosphate
  modified_base 6: mod_base = OTHER; note = 2'-O-methyluridine-3'-phosphate
  modified_base 7: mod_base = OTHER; note = 2'-fluoroadenosine-3'-phosphate
  modified_base 8: mod_base = OTHER; note = 2'-O-methyluridine-3'-phosphate
  modified_base 9: mod_base = OTHER; note = 2'-fluorocytidine-3'-phosphate
  modified_base 10: mod_base = OTHER; note = 2'-fluorouridine-3'-phosphate
  modified_base 11: mod_base = OTHER; note = 2'-fluoroguanosine-3'-phosphate
  modified_base 12: mod_base = OTHER; note = 2'-O-methylguanosine-3'-phosphate
  modified_base 13: mod_base = OTHER; note = 2'-O-methyladenosine-3'-phosphate
  modified_base 14: mod_base = OTHER; note = 2'-O-methyluridine-3'-phosphate
  modified_base 15: mod_base = OTHER; note = 2'-O-methylguanosine-3'-phosphate
  modified_base 16: mod_base = OTHER; note = 2'-O-methyluridine-3'-phosphate
  modified_base 17: mod_base = OTHER; note = 2'-O-methylcytidine-3'-phosphate
  modified_base 18: mod_base = OTHER; note = 2'-O-methyluridine-3'-phosphate
  modified_base 19: mod_base = OTHER; note = 2'-O-methyladenosine-3'-phosphate
  modified_base 20: mod_base = OTHER; note = 2'-O-methyluridine-3'-phosphate
  modified_base 21: mod_base = OTHER; note = 2'-O-methyluridine-3'-phosphate N-[tris(GalNAc-alkyl)-amidodecanoyl)]-4-hydroxyprolinol (Hyp-(GalNAc-alkyl)3)
aggattatctggatgtctatt

SEQ ID NO: 611 - RNA, 21 nt, synthetic construct
  misc_feature 1..21: note = Description of Artificial Sequence: Synthetic oligonucleotide
  source 1..21: mol_type = other RNA
  modified_base 1: mod_base = OTHER; note = 2'-O-methylguanosine-3'-phosphorothioate
  modified_base 2: mod_base = OTHER; note = 2'-O-methyluridine-3'-phosphorothioate
  modified_base 3: mod_base = OTHER; note = 2'-O-methylguanosine-3'-phosphate
  modified_base 4: mod_base = OTHER; note = 2'-O-methyluridine-3'-phosphate
  modified_base 5: mod_base = OTHER; note = 2'-O-methyluridine-3'-phosphate
  modified_base 6: mod_base = OTHER; note = 2'-O-methylcytidine-3'-phosphate
  modified_base 7: mod_base = OTHER; note = 2'-fluoroadenosine-3'-phosphate
  modified_base 8: mod_base = OTHER; note = 2'-O-methyladenosine-3'-phosphate
  modified_base 9: mod_base = OTHER; note = 2'-fluoroadenosine-3'-phosphate
  modified_base 10: mod_base = OTHER; note = 2'-fluoroguanosine-3'-phosphate
  modified_base 11: mod_base = OTHER; note = 2'-fluorouridine-3'-phosphate
  modified_base 12: mod_base = OTHER; note = 2'-O-methylcytidine-3'-phosphate
  modified_base 13: mod_base = OTHER; note = 2'-O-methyladenosine-3'-phosphate
  modified_base 14: mod_base = OTHER; note = 2'-O-methyladenosine-3'-phosphate
  modified_base 15: mod_base = OTHER; note = 2'-O-methylguanosine-3'-phosphate
  modified_base 16: mod_base = OTHER; note = 2'-O-methylguanosine-3'-phosphate
  modified_base 17: mod_base = OTHER; note = 2'-O-methyladenosine-3'-phosphate
  modified_base 18: mod_base = OTHER; note = 2'-O-methyluridine-3'-phosphate
  modified_base 19: mod_base = OTHER; note = 2'-O-methyladenosine-3'-phosphate
  modified_base 20: mod_base = OTHER; note = 2'-O-methyluridine-3'-phosphate
  modified_base 21: mod_base = OTHER; note = 2'-O-methyluridine-3'-phosphate N-[tris(GalNAc-alkyl)-amidodecanoyl)]-4-hydroxyprolinol (Hyp-(GalNAc-alkyl)3)
gtgttcaaagtcaaggatatt

SEQ ID NO: 612 - RNA, 21 nt, synthetic construct
  misc_feature 1..21: note = Description of Artificial Sequence: Synthetic oligonucleotide
  source 1..21: mol_type = other RNA
  modified_base 1: mod_base = OTHER; note = 2'-O-methyladenosine-3'-phosphorothioate
  modified_base 2: mod_base = OTHER; note = 2'-O-methyladenosine-3'-phosphorothioate
  modified_base 3: mod_base = OTHER; note = 2'-O-methylguanosine-3'-phosphate
  modified_base 4: mod_base = OTHER; note = 2'-O-methylguanosine-3'-phosphate
  modified_base 5: mod_base = OTHER; note = 2'-O-methyladenosine-3'-phosphate
  modified_base 6: mod_base = OTHER; note = 2'-O-methylguanosine-3'-phosphate
  modified_base 7: mod_base = OTHER; note = 2'-fluoroguanosine-3'-phosphate
  modified_base 8: mod_base = OTHER; note = 2'-O-methyluridine-3'-phosphate
  modified_base 9: mod_base = OTHER; note = 2'-fluorocytidine-3'-phosphate
  modified_base 10: mod_base = OTHER; note = 2'-fluorouridine-3'-phosphate
  modified_base 11: mod_base = OTHER; note = 2'-fluoroadenosine-3'-phosphate
  modified_base 12: mod_base = OTHER; note = 2'-O-methylcytidine-3'-phosphate
  modified_base 13: mod_base = OTHER; note = 2'-O-methyladenosine-3'-phosphate
  modified_base 14: mod_base = OTHER; note = 2'-O-methyluridine-3'-phosphate
  modified_base 15: mod_base = OTHER; note = 2'-O-methylcytidine-3'-phosphate
  modified_base 16: mod_base = OTHER; note = 2'-O-methyladenosine-3'-phosphate
  modified_base 17: mod_base = OTHER; note = 2'-O-methyladenosine-3'-phosphate
  modified_base 18: mod_base = OTHER; note = 2'-O-methylguanosine-3'-phosphate
  modified_base 19: mod_base = OTHER; note = 2'-O-methyladenosine-3'-phosphate
  modified_base 20: mod_base = OTHER; note = 2'-O-methyladenosine-3'-phosphate
  modified_base 21: mod_base = OTHER; note = 2'-O-methyluridine-3'-phosphate N-[tris(GalNAc-alkyl)-amidodecanoyl)]-4-hydroxyprolinol (Hyp-(GalNAc-alkyl)3)
aaggaggtctacatcaagaat

SEQ ID NO: 613 - RNA, 21 nt, synthetic construct
  misc_feature 1..21: note = Description of Artificial Sequence: Synthetic oligonucleotide
  source 1..21: mol_type = other RNA
  modified_base 1: mod_base = OTHER; note = 2'-O-methyluridine-3'-phosphorothioate
  modified_base 2: mod_base = OTHER; note = 2'-O-methylcytidine-3'-phosphorothioate
  modified_base 3: mod_base = OTHER; note = 2'-O-methyladenosine-3'-phosphate
  modified_base 4: mod_base = OTHER; note = 2'-O-methylguanosine-3'-phosphate
  modified_base 5: mod_base = OTHER; note = 2'-O-methylguanosine-3'-phosphate
  modified_base 6: mod_base = OTHER; note = 2'-O-methylcytidine-3'-phosphate
  modified_base 7: mod_base = OTHER; note = 2'-fluorouridine-3'-phosphate
  modified_base 8: mod_base = OTHER; note = 2'-O-methylcytidine-3'-phosphate
  modified_base 9: mod_base = OTHER; note = 2'-fluorocytidine-3'-phosphate
  modified_base 10: mod_base = OTHER; note = 2'-fluoroadenosine-3'-phosphate
  modified_base 11: mod_base = OTHER; note = 2'-fluorouridine-3'-phosphate
  modified_base 12: mod_base = OTHER; note = 2'-O-methylguanosine-3'-phosphate
  modified_base 13: mod_base = OTHER; note = 2'-O-methyladenosine-3'-phosphate
  modified_base 14: mod_base = OTHER; note = 2'-O-methyladenosine-3'-phosphate
  modified_base 15: mod_base = OTHER; note = 2'-O-methylcytidine-3'-phosphate
  modified_base 16: mod_base = OTHER; note = 2'-O-methyladenosine-3'-phosphate
  modified_base 17: mod_base = OTHER; note = 2'-O-methyluridine-3'-phosphate
  modified_base 18: mod_base = OTHER; note = 2'-O-methylcytidine-3'-phosphate
  modified_base 19: mod_base = OTHER; note = 2'-O-methyluridine-3'-phosphate
  modified_base 20: mod_base = OTHER; note = 2'-O-methyladenosine-3'-phosphate
  modified_base 21: mod_base = OTHER; note = 2'-O-methyluridine-3'-phosphate N-[tris(GalNAc-alkyl)-amidodecanoyl)]-4-hydroxyprolinol (Hyp-(GalNAc-alkyl)3)
tcaggctccatgaacatctat

SEQ ID NO: 614 - RNA, 21 nt, synthetic construct
  misc_feature 1..21: note = Description of Artificial Sequence: Synthetic oligonucleotide
  source 1..21: mol_type = other RNA
  modified_base 1: mod_base = OTHER; note = 2'-O-methylguanosine-3'-phosphorothioate
  modified_base 2: mod_base = OTHER; note = 2'-O-methyluridine-3'-phosphorothioate
  modified_base 3: mod_base = OTHER; note = 2'-O-methylguanosine-3'-phosphate
  modified_base 4: mod_base = OTHER; note = 2'-O-methylguanosine-3'-phosphate
  modified_base 5: mod_base = OTHER; note = 2'-O-methyladenosine-3'-phosphate
  modified_base 6: mod_base = OTHER; note = 2'-O-methyluridine-3'-phosphate
  modified_base 7: mod_base = OTHER; note = 2'-fluoroguanosine-3'-phosphate
  modified_base 8: mod_base = OTHER; note = 2'-O-methyluridine-3'-phosphate
  modified_base 9: mod_base = OTHER; note = 2'-fluorocytidine-3'-phosphate
  modified_base 10: mod_base = OTHER; note = 2'-fluorouridine-3'-phosphate
  modified_base 11: mod_base = OTHER; note = 2'-fluoroguanosine-3'-phosphate
  modified_base 12: mod_base = OTHER; note = 2'-O-methylcytidine-3'-phosphate
  modified_base 13: mod_base = OTHER; note = 2'-O-methyladenosine-3'-phosphate
  modified_base 14: mod_base = OTHER; note = 2'-O-methyladenosine-3'-phosphate
  modified_base 15: mod_base = OTHER; note = 2'-O-methyladenosine-3'-phosphate
  modified_base 16: mod_base = OTHER; note = 2'-O-methyladenosine-3'-phosphate
  modified_base 17: mod_base = OTHER; note = 2'-O-methyladenosine-3'-phosphate
  modified_base 18: mod_base = OTHER; note = 2'-O-methylcytidine-3'-phosphate
  modified_base 19: mod_base = OTHER; note = 2'-O-methylcytidine-3'-phosphate
  modified_base 20: mod_base = OTHER; note = 2'-O-methyladenosine-3'-phosphate
  modified_base 21: mod_base = OTHER; note = 2'-O-methyluridine-3'-phosphate N-[tris(GalNAc-alkyl)-amidodecanoyl)]-4-hydroxyprolinol (Hyp-(GalNAc-alkyl)3)
gtggatgtctgcaaaaaccat

SEQ ID NO: 615 - RNA, 21 nt, synthetic construct
  misc_feature 1..21: note = Description of Artificial Sequence: Synthetic oligonucleotide
  source 1..21: mol_type = other RNA
  modified_base 1: mod_base = OTHER; note = 2'-O-methylguanosine-3'-phosphorothioate
  modified_base 2: mod_base = OTHER; note = 2'-O-methyluridine-3'-phosphorothioate
  modified_base 3: mod_base = OTHER; note = 2'-O-methylguanosine-3'-phosphate
  modified_base 4: mod_base = OTHER; note = 2'-O-methyladenosine-3'-phosphate
  modified_base 5: mod_base = OTHER; note = 2'-O-methylguanosine-3'-phosphate
  modified_base 6: mod_base = OTHER; note = 2'-O-methyladenosine-3'-phosphate
  modified_base 7: mod_base = OTHER; note = 2'-fluoroguanosine-3'-phosphate
  modified_base 8: mod_base = OTHER; note = 2'-O-methyladenosine-3'-phosphate
  modified_base 9: mod_base = OTHER; note = 2'-fluoroguanosine-3'-phosphate
  modified_base 10: mod_base = OTHER; note = 2'-fluoroadenosine-3'-phosphate
  modified_base 11: mod_base = OTHER; note = 2'-fluorouridine-3'-phosphate
  modified_base 12: mod_base = OTHER; note = 2'-O-methylguanosine-3'-phosphate
  modified_base 13: mod_base = OTHER; note = 2'-O-methylcytidine-3'-phosphate
  modified_base 14: mod_base = OTHER; note = 2'-O-methyluridine-3'-phosphate
  modified_base 15: mod_base = OTHER; note = 2'-O-methylcytidine-3'-phosphate
  modified_base 16: mod_base = OTHER; note = 2'-O-methyladenosine-3'-phosphate
  modified_base 17: mod_base = OTHER; note = 2'-O-methyladenosine-3'-phosphate
  modified_base 18: mod_base = OTHER; note = 2'-O-methyluridine-3'-phosphate
  modified_base 19: mod_base = OTHER; note = 2'-O-methyladenosine-3'-phosphate
  modified_base 20: mod_base = OTHER; note = 2'-O-methyluridine-3'-phosphate
  modified_base 21: mod_base = OTHER; note = 2'-O-methyluridine-3'-phosphate N-[tris(GalNAc-alkyl)-amidodecanoyl)]-4-hydroxyprolinol (Hyp-(GalNAc-alkyl)3)
gtgagagagatgctcaatatt

SEQ ID NO: 616 - RNA, 21 nt, synthetic construct
  misc_feature 1..21: note = Description of Artificial Sequence: Synthetic oligonucleotide
  source 1..21: mol_type = other RNA
  modified_base 1: mod_base = OTHER; note = 2'-O-methyladenosine-3'-phosphorothioate
  modified_base 2: mod_base = OTHER; note = 2'-O-methyluridine-3'-phosphorothioate
  modified_base 3: mod_base = OTHER; note = 2'-O-methylcytidine-3'-phosphate
  modified_base 4: mod_base = OTHER; note = 2'-O-methylguanosine-3'-phosphate
  modified_base 5: mod_base = OTHER; note = 2'-O-methylcytidine-3'-phosphate
  modified_base 6: mod_base = OTHER; note = 2'-O-methyladenosine-3'-phosphate
  modified_base 7: mod_base = OTHER; note = 2'-fluorocytidine-3'-phosphate
  modified_base 8: mod_base = OTHER; note = 2'-O-methylcytidine-3'-phosphate
  modified_base 9: mod_base = OTHER; note = 2'-fluorouridine-3'-phosphate
  modified_base 10: mod_base = OTHER; note = 2'-fluoroguanosine-3'-phosphate
  modified_base 11: mod_base = OTHER; note = 2'-fluorocytidine-3'-phosphate
  modified_base 12: mod_base = OTHER; note = 2'-O-methylcytidine-3'-phosphate
  modified_base 13: mod_base = OTHER; note = 2'-O-methyladenosine-3'-phosphate
  modified_base 14: mod_base = OTHER; note = 2'-O-methyladenosine-3'-phosphate
  modified_base 15: mod_base = OTHER; note = 2'-O-methylguanosine-3'-phosphate
  modified_base 16: mod_base = OTHER; note = 2'-O-methyluridine-3'-phosphate
  modified_base 17: mod_base = OTHER; note = 2'-O-methylguanosine-3'-phosphate
  modified_base 18: mod_base = OTHER; note = 2'-O-methyladenosine-3'-phosphate
  modified_base 19: mod_base = OTHER; note = 2'-O-methyladenosine-3'-phosphate
  modified_base 20: mod_base = OTHER; note = 2'-O-methyluridine-3'-phosphate
  modified_base 21: mod_base = OTHER; note = 2'-O-methyluridine-3'-phosphate N-[tris(GalNAc-alkyl)-amidodecanoyl)]-4-hydroxyprolinol (Hyp-(GalNAc-alkyl)3)
atcgcacctgccaagtgaatt

SEQ ID NO: 617 - RNA, 21 nt, synthetic construct
  misc_feature 1..21: note = Description of Artificial Sequence: Synthetic oligonucleotide
  source 1..21: mol_type = other RNA
  modified_base 1: mod_base = OTHER; note = 2'-O-methyluridine-3'-phosphorothioate
  modified_base 2: mod_base = OTHER; note = 2'-O-methylcytidine-3'-phosphorothioate
  modified_base 3: mod_base = OTHER; note = 2'-O-methyladenosine-3'-phosphate
  modified_base 4: mod_base = OTHER; note = 2'-O-methylcytidine-3'-phosphate
  modified_base 5: mod_base = OTHER; note = 2'-O-methyladenosine-3'-phosphate
  modified_base 6: mod_base = OTHER; note = 2'-O-methylguanosine-3'-phosphate
  modified_base 7: mod_base = OTHER; note = 2'-fluoroguanosine-3'-phosphate
  modified_base 8: mod_base = OTHER; note = 2'-O-methyladenosine-3'-phosphate
  modified_base 9: mod_base = OTHER; note = 2'-fluoroguanosine-3'-phosphate
  modified_base 10: mod_base = OTHER; note = 2'-fluorocytidine-3'-phosphate
  modified_base 11: mod_base = OTHER; note = 2'-fluorocytidine-3'-phosphate
  modified_base 12: mod_base = OTHER; note = 2'-O-methyladenosine-3'-phosphate
  modified_base 13: mod_base = OTHER; note = 2'-O-methyladenosine-3'-phosphate
  modified_base 14: mod_base = OTHER; note = 2'-O-methyladenosine-3'-phosphate
  modified_base 15: mod_base = OTHER; note = 2'-O-methyladenosine-3'-phosphate
  modified_base 16: mod_base = OTHER; note = 2'-O-methyladenosine-3'-phosphate
  modified_base 17: mod_base = OTHER; note = 2'-O-methylguanosine-3'-phosphate
  modified_base 18: mod_base = OTHER; note = 2'-O-methyluridine-3'-phosphate
  modified_base 19: mod_base = OTHER; note = 2'-O-methylguanosine-3'-phosphate
  modified_base 20: mod_base = OTHER; note = 2'-O-methyluridine-3'-phosphate
  modified_base 21: mod_base = OTHER; note = 2'-O-methyluridine-3'-phosphate N-[tris(GalNAc-alkyl)-amidodecanoyl)]-4-hydroxyprolinol (Hyp-(GalNAc-alkyl)3)
tcacaggagccaaaaagtgtt

SEQ ID NO: 618 - RNA, 21 nt, synthetic construct
  misc_feature 1..21: note = Description of Artificial Sequence: Synthetic oligonucleotide
  source 1..21: mol_type = other RNA
  modified_base 1: mod_base = OTHER; note = 2'-O-methyladenosine-3'-phosphorothioate
  modified_base 2: mod_base = OTHER; note = 2'-O-methyladenosine-3'-phosphorothioate
  modified_base 3: mod_base = OTHER; note = 2'-O-methyladenosine-3'-phosphate
  modified_base 4: mod_base = OTHER; note = 2'-O-methyladenosine-3'-phosphate
  modified_base 5: mod_base = OTHER; note = 2'-O-methylcytidine-3'-phosphate
  modified_base 6: mod_base = OTHER; note = 2'-O-methylcytidine-3'-phosphate
  modified_base 7: mod_base = OTHER; note = 2'-fluorocytidine-3'-phosphate
  modified_base 8: mod_base = OTHER; note = 2'-O-methyladenosine-3'-phosphate
  modified_base 9: mod_base = OTHER; note = 2'-fluoroadenosine-3'-phosphate
  modified_base 10: mod_base = OTHER; note = 2'-fluoroguanosine-3'-phosphate
  modified_base 11: mod_base = OTHER; note = 2'-fluoroguanosine-3'-phosphate
  modified_base 12: mod_base = OTHER; note = 2'-O-methylguanosine-3'-phosphate
  modified_base 13: mod_base = OTHER; note = 2'-O-methyladenosine-3'-phosphate
  modified_base 14: mod_base = OTHER; note = 2'-O-methylguanosine-3'-phosphate
  modified_base 15: mod_base = OTHER; note = 2'-O-methylguanosine-3'-phosphate
  modified_base 16: mod_base = OTHER; note = 2'-O-methyladenosine-3'-phosphate
  modified_base 17: mod_base = OTHER; note = 2'-O-methyluridine-3'-phosphate
  modified_base 18: mod_base = OTHER; note = 2'-O-methyluridine-3'-phosphate
  modified_base 19: mod_base = OTHER; note = 2'-O-methyladenosine-3'-phosphate
  modified_base 20: mod_base = OTHER; note = 2'-O-methyluridine-3'-phosphate
  modified_base 21: mod_base = OTHER; note = 2'-O-methyluridine-3'-phosphate N-[tris(GalNAc-alkyl)-amidodecanoyl)]-4-hydroxyprolinol (Hyp-(GalNAc-alkyl)3)
aaaacccaagggaggattatt

SEQ ID NO: 619 - RNA, 21 nt, synthetic construct
  misc_feature 1..21: note = Description of Artificial Sequence: Synthetic oligonucleotide
  source 1..21: mol_type = other RNA
  modified_base 1: mod_base = OTHER; note = 2'-O-methyladenosine-3'-phosphorothioate
  modified_base 2: mod_base = OTHER; note = 2'-O-methyladenosine-3'-phosphorothioate
  modified_base 3: mod_base = OTHER; note = 2'-O-methyladenosine-3'-phosphate
  modified_base 4: mod_base = OTHER; note = 2'-O-methyladenosine-3'-phosphate
  modified_base 5: mod_base = OTHER; note = 2'-O-methylguanosine-3'-phosphate
  modified_base 6: mod_base = OTHER; note = 2'-O-methyluridine-3'-phosphate
  modified_base 7: mod_base = OTHER; note = 2'-fluoroguanosine-3'-phosphate
  modified_base 8: mod_base = OTHER; note = 2'-O-methyluridine-3'-phosphate
  modified_base 9: mod_base = OTHER; note = 2'-fluorocytidine-3'-phosphate
  modified_base 10: mod_base = OTHER; note = 2'-fluorouridine-3'-phosphate
  modified_base 11: mod_base = OTHER; note = 2'-fluoroadenosine-3'-phosphate
  modified_base 12: mod_base = OTHER; note = 2'-O-methylguanosine-3'-phosphate
  modified_base 13: mod_base = OTHER; note = 2'-O-methyluridine-3'-phosphate
  modified_base 14: mod_base = OTHER; note = 2'-O-methylcytidine-3'-phosphate
  modified_base 15: mod_base = OTHER; note = 2'-O-methyladenosine-3'-phosphate
  modified_base 16: mod_base = OTHER; note = 2'-O-methyladenosine-3'-phosphate
  modified_base 17: mod_base = OTHER; note = 2'-O-methylcytidine-3'-phosphate
  modified_base 18: mod_base = OTHER; note = 2'-O-methyluridine-3'-phosphate
  modified_base 19: mod_base = OTHER; note = 2'-O-methyluridine-3'-phosphate
  modified_base 20: mod_base = OTHER; note = 2'-O-methyladenosine-3'-phosphate
  modified_base 21: mod_base = OTHER; note = 2'-O-methyluridine-3'-phosphate N-[tris(GalNAc-alkyl)-amidodecanoyl)]-4-hydroxyprolinol (Hyp-(GalNAc-alkyl)3)
aaaagtgtctagtcaacttat

SEQ ID NO: 620 - RNA, 21 nt, synthetic construct
  misc_feature 1..21: note = Description of Artificial Sequence: Synthetic oligonucleotide
  source 1..21: mol_type = other RNA
  modified_base 1: mod_base = OTHER; note = 2'-O-methylcytidine-3'-phosphorothioate
  modified_base 2: mod_base = OTHER; note = 2'-O-methyladenosine-3'-phosphorothioate
  modified_base 3: mod_base = OTHER; note = 2'-O-methylguanosine-3'-phosphate
  modified_base 4: mod_base = OTHER; note = 2'-O-methylcytidine-3'-phosphate
  modified_base 5: mod_base = OTHER; note = 2'-O-methyluridine-3'-phosphate
  modified_base 6: mod_base = OTHER; note = 2'-O-methylcytidine-3'-phosphate
  modified_base 7: mod_base = OTHER; note = 2'-fluoroadenosine-3'-phosphate
  modified_base 8: mod_base = OTHER; note = 2'-O-methyladenosine-3'-phosphate
  modified_base 9: mod_base = OTHER; note = 2'-fluorouridine-3'-phosphate
  modified_base 10: mod_base = OTHER; note = 2'-fluoroguanosine-3'-phosphate
  modified_base 11: mod_base = OTHER; note = 2'-fluoroadenosine-3'-phosphate
  modified_base 12: mod_base = OTHER; note = 2'-O-methyladenosine-3'-phosphate
  modified_base 13: mod_base = OTHER; note = 2'-O-methyladenosine-3'-phosphate
  modified_base 14: mod_base = OTHER; note = 2'-O-methyluridine-3'-phosphate
  modified_base 15: mod_base = OTHER; note = 2'-O-methylcytidine-3'-phosphate
  modified_base 16: mod_base = OTHER; note = 2'-O-methyladenosine-3'-phosphate
  modified_base 17: mod_base = OTHER; note = 2'-O-methyladenosine-3'-phosphate
  modified_base 18: mod_base = OTHER; note = 2'-O-methyluridine-3'-phosphate
  modified_base 19: mod_base = OTHER; note = 2'-O-methyluridine-3'-phosphate
  modified_base 20: mod_base = OTHER; note = 2'-O-methyladenosine-3'-phosphate
  modified_base 21: mod_base = OTHER; note = 2'-O-methyluridine-3'-phosphate N-[tris(GalNAc-alkyl)-amidodecanoyl)]-4-hydroxyprolinol (Hyp-(GalNAc-alkyl)3)
cagctcaatgaaatcaattat

SEQ ID NO: 621 - RNA, 21 nt, synthetic construct
  misc_feature 1..21: note = Description of Artificial Sequence: Synthetic oligonucleotide
  source 1..21: mol_type = other RNA
  modified_base 1: mod_base = OTHER; note = 2'-O-methyluridine-3'-phosphorothioate
  modified_base 2: mod_base = OTHER; note = 2'-O-methyladenosine-3'-phosphorothioate
  modified_base 3: mod_base = OTHER; note = 2'-O-methyluridine-3'-phosphate
  modified_base 4: mod_base = OTHER; note = 2'-O-methylcytidine-3'-phosphate
  modified_base 5: mod_base = OTHER; note = 2'-O-methyluridine-3'-phosphate
  modified_base 6: mod_base = OTHER; note = 2'-O-methylguanosine-3'-phosphate
  modified_base 7: mod_base = OTHER; note = 2'-fluoroguanosine-3'-phosphate
  modified_base 8: mod_base = OTHER; note = 2'-O-methyladenosine-3'-phosphate
  modified_base 9: mod_base = OTHER; note = 2'-fluorouridine-3'-phosphate
  modified_base 10: mod_base = OTHER; note = 2'-fluoroguanosine-3'-phosphate
  modified_base 11: mod_base = OTHER; note = 2'-fluorouridine-3'-phosphate
  modified_base 12: mod_base = OTHER; note = 2'-O-methylcytidine-3'-phosphate
  modified_base 13: mod_base = OTHER; note = 2'-O-methyluridine-3'-phosphate
  modified_base 14: mod_base = OTHER; note = 2'-O-methyladenosine-3'-phosphate
  modified_base 15: mod_base = OTHER; note = 2'-O-methyluridine-3'-phosphate
  modified_base 16: mod_base = OTHER; note = 2'-O-methylguanosine-3'-phosphate
  modified_base 17: mod_base = OTHER; note = 2'-O-methyluridine-3'-phosphate
  modified_base 18: mod_base = OTHER; note = 2'-O-methylguanosine-3'-phosphate
  modified_base 19: mod_base = OTHER; note = 2'-O-methyluridine-3'-phosphate
  modified_base 20: mod_base = OTHER; note = 2'-O-methyluridine-3'-phosphate
  modified_base 21: mod_base = OTHER; note = 2'-O-methyluridine-3'-phosphate N-[tris(GalNAc-alkyl)-amidodecanoyl)]-4-hydroxyprolinol (Hyp-(GalNAc-alkyl)3)
tatctggatgtctatgtgttt

SEQ ID NO: 622 - RNA, 21 nt, synthetic construct
  misc_feature 1..21: note = Description of Artificial Sequence: Synthetic oligonucleotide
  source 1..21: mol_type = other RNA
  modified_base 1: mod_base = OTHER; note = 2'-O-methylguanosine-3'-phosphorothioate
  modified_base 2: mod_base = OTHER; note = 2'-O-methylguanosine-3'-phosphorothioate
  modified_base 3: mod_base = OTHER; note = 2'-O-methylcytidine-3'-phosphate
  modified_base 4: mod_base = OTHER; note = 2'-O-methylguanosine-3'-phosphate
  modified_base 5: mod_base = OTHER; note = 2'-O-methyluridine-3'-phosphate
  modified_base 6: mod_base = OTHER; note = 2'-O-methylguanosine-3'-phosphate
  modified_base 7: mod_base = OTHER; note = 2'-fluoroguanosine-3'-phosphate
  modified_base 8: mod_base = OTHER; note = 2'-O-methylguanosine-3'-phosphate
  modified_base 9: mod_base = OTHER; note = 2'-fluoroadenosine-3'-phosphate
  modified_base 10: mod_base = OTHER; note = 2'-fluorouridine-3'-phosphate
  modified_base 11: mod_base = OTHER; note = 2'-fluorouridine-3'-phosphate
  modified_base 12: mod_base = OTHER; note = 2'-O-methylguanosine-3'-phosphate
  modified_base 13: mod_base = OTHER; note = 2'-O-methyladenosine-3'-phosphate
  modified_base 14: mod_base = OTHER; note = 2'-O-methyladenosine-3'-phosphate
  modified_base 15: mod_base = OTHER; note = 2'-O-methyluridine-3'-phosphate
  modified_base 16: mod_base = OTHER; note = 2'-O-methyluridine-3'-phosphate
  modified_base 17: mod_base = OTHER; note = 2'-O-methyladenosine-3'-phosphate
  modified_base 18: mod_base = OTHER; note = 2'-O-methyladenosine-3'-phosphate
  modified_base 19: mod_base = OTHER; note = 2'-O-methyladenosine-3'-phosphate
  modified_base 20: mod_base = OTHER; note = 2'-O-methyladenosine-3'-phosphate
  modified_base 21: mod_base = OTHER; note = 2'-O-methyluridine-3'-phosphate N-[tris(GalNAc-alkyl)-amidodecanoyl)]-4-hydroxyprolinol (Hyp-(GalNAc-alkyl)3)
ggcgtgggattgaattaaaat

SEQ ID NO: 623 - RNA, 21 nt, synthetic construct
  misc_feature 1..21: note = Description of Artificial Sequence: Synthetic oligonucleotide
  source 1..21: mol_type = other RNA
  modified_base 1: mod_base = OTHER; note = 2'-O-methyluridine-3'-phosphorothioate
  modified_base 2: mod_base = OTHER; note = 2'-O-methylguanosine-3'-phosphorothioate
  modified_base 3: mod_base = OTHER; note = 2'-O-methyladenosine-3'-phosphate
  modified_base 4: mod_base = OTHER; note = 2'-O-methylguanosine-3'-phosphate
  modified_base 5: mod_base = OTHER; note = 2'-O-methyladenosine-3'-phosphate
  modified_base 6: mod_base = OTHER; note = 2'-O-methylguanosine-3'-phosphate
  modified_base 7: mod_base = OTHER; note = 2'-fluoroadenosine-3'-phosphate
  modified_base 8: mod_base = OTHER; note = 2'-O-methylguanosine-3'-phosphate
  modified_base 9: mod_base = OTHER; note = 2'-fluoroadenosine-3'-phosphate
  modified_base 10: mod_base = OTHER; note = 2'-fluorouridine-3'-phosphate
  modified_base 11: mod_base = OTHER; note = 2'-fluoroguanosine-3'-phosphate
  modified_base 12: mod_base = OTHER; note = 2'-O-methylcytidine-3'-phosphate
  modified_base 13: mod_base = OTHER; note = 2'-O-methyluridine-3'-phosphate
  modified_base 14: mod_base = OTHER; note = 2'-O-methylcytidine-3'-phosphate
  modified_base 15: mod_base = OTHER; note = 2'-O-methyladenosine-3'-phosphate
  modified_base 16: mod_base = OTHER; note = 2'-O-methyladenosine-3'-phosphate
  modified_base 17: mod_base = OTHER; note = 2'-O-methyluridine-3'-phosphate
  modified_base 18: mod_base = OTHER; note = 2'-O-methyladenosine-3'-phosphate
  modified_base 19: mod_base = OTHER; note = 2'-O-methyluridine-3'-phosphate
  modified_base 20: mod_base = OTHER; note = 2'-O-methylguanosine-3'-phosphate
  modified_base 21: mod_base = OTHER; note = 2'-O-methyluridine-3'-phosphate N-[tris(GalNAc-alkyl)-amidodecanoyl)]-4-hydroxyprolinol (Hyp-(GalNAc-alkyl)3)
tgagagagatgctcaatatgt

SEQ ID NO: 624 - RNA, 21 nt, synthetic construct
  misc_feature 1..21: note = Description of Artificial Sequence: Synthetic oligonucleotide
  source 1..21: mol_type = other RNA
  modified_base 1: mod_base = OTHER; note = 2'-O-methylguanosine-3'-phosphorothioate
  modified_base 2: mod_base = OTHER; note = 2'-O-methyluridine-3'-phosphorothioate
  modified_base 3: mod_base = OTHER; note = 2'-O-methylguanosine-3'-phosphate
  modified_base 4: mod_base = OTHER; note = 2'-O-methylguanosine-3'-phosphate
  modified_base 5: mod_base = OTHER; note = 2'-O-methyluridine-3'-phosphate
  modified_base 6: mod_base = OTHER; note = 2'-O-methylguanosine-3'-phosphate
  modified_base 7: mod_base = OTHER; note = 2'-fluorouridine-3'-phosphate
  modified_base 8: mod_base = OTHER; note = 2'-O-methylcytidine-3'-phosphate
  modified_base 9: mod_base = OTHER; note = 2'-fluorouridine-3'-phosphate
  modified_base 10: mod_base = OTHER; note = 2'-fluoroguanosine-3'-phosphate
  modified_base 11: mod_base = OTHER; note = 2'-fluoroadenosine-3'-phosphate
  modified_base 12: mod_base = OTHER; note = 2'-O-methylguanosine-3'-phosphate
  modified_base 13: mod_base = OTHER; note = 2'-O-methyluridine-3'-phosphate
  modified_base 14: mod_base = OTHER; note = 2'-O-methyladenosine-3'-phosphate
  modified_base 15: mod_base = OTHER; note = 2'-O-methylcytidine-3'-phosphate
  modified_base 16: mod_base = OTHER; note = 2'-O-methyluridine-3'-phosphate
  modified_base 17: mod_base = OTHER; note = 2'-O-methyluridine-3'-phosphate
  modified_base 18: mod_base = OTHER; note = 2'-O-methyluridine-3'-phosphate
  modified_base 19: mod_base = OTHER; note = 2'-O-methylguanosine-3'-phosphate
  modified_base 20: mod_base = OTHER; note = 2'-O-methyluridine-3'-phosphate
  modified_base 21: mod_base = OTHER; note = 2'-O-methyluridine-3'-phosphate N-[tris(GalNAc-alkyl)-amidodecanoyl)]-4-hydroxyprolinol (Hyp-(GalNAc-alkyl)3)
gtggtgtctgagtactttgtt

SEQ ID NO: 625 - RNA, 21 nt, synthetic construct
  misc_feature 1..21: note = Description of Artificial Sequence: Synthetic oligonucleotide
  source 1..21: mol_type = other RNA
  modified_base 1: mod_base = OTHER; note = 2'-O-methylguanosine-3'-phosphorothioate
  modified_base 2: mod_base = OTHER; note = 2'-O-methylcytidine-3'-phosphorothioate
  modified_base 3: mod_base = OTHER; note = 2'-O-methyladenosine-3'-phosphate
  modified_base 4: mod_base = OTHER; note = 2'-O-methylguanosine-3'-phosphate
  modified_base 5: mod_base = OTHER; note = 2'-O-methylcytidine-3'-phosphate
  modified_base 6: mod_base = OTHER; note = 2'-O-methyluridine-3'-phosphate
  modified_base 7: mod_base = OTHER; note = 2'-fluorocytidine-3'-phosphate
  modified_base 8: mod_base = OTHER; note = 2'-O-methyladenosine-3'-phosphate
  modified_base 9: mod_base = OTHER; note = 2'-fluoroadenosine-3'-phosphate
  modified_base 10: mod_base = OTHER; note = 2'-fluorouridine-3'-phosphate
  modified_base 11: mod_base = OTHER; note = 2'-fluoroguanosine-3'-phosphate
  modified_base 12: mod_base = OTHER; note = 2'-O-methyladenosine-3'-phosphate
  modified_base 13: mod_base = OTHER; note = 2'-O-methyladenosine-3'-phosphate
  modified_base 14: mod_base = OTHER; note = 2'-O-methyladenosine-3'-phosphate
  modified_base 15: mod_base = OTHER; note = 2'-O-methyluridine-3'-phosphate
  modified_base 16: mod_base = OTHER; note = 2'-O-methylcytidine-3'-phosphate
  modified_base 17: mod_base = OTHER; note = 2'-O-methyladenosine-3'-phosphate
  modified_base 18: mod_base = OTHER; note = 2'-O-methyladenosine-3'-phosphate
  modified_base 19: mod_base = OTHER; note = 2'-O-methyluridine-3'-phosphate
  modified_base 20: mod_base = OTHER; note = 2'-O-methyluridine-3'-phosphate
  modified_base 21: mod_base = OTHER; note = 2'-O-methyluridine-3'-phosphate N-[tris(GalNAc-alkyl)-amidodecanoyl)]-4-hydroxyprolinol (Hyp-(GalNAc-alkyl)3)
gcagctcaatgaaatcaattt

SEQ ID NO: 626 - RNA, 21 nt, synthetic construct
  misc_feature 1..21: note = Description of Artificial Sequence: Synthetic oligonucleotide
  source 1..21: mol_type = other RNA
  modified_base 1: mod_base = OTHER; note = 2'-O-methylcytidine-3'-phosphorothioate
  modified_base 2: mod_base = OTHER; note = 2'-O-methylguanosine-3'-phosphorothioate
  modified_base 3: mod_base = OTHER; note = 2'-O-methylguanosine-3'-phosphate
  modified_base 4: mod_base = OTHER; note = 2'-O-methyluridine-3'-phosphate
  modified_base 5: mod_base = OTHER; note = 2'-O-methylcytidine-3'-phosphate
  modified_base 6: mod_base = OTHER; note = 2'-O-methyluridine-3'-phosphate
  modified_base 7: mod_base = OTHER; note = 2'-fluorocytidine-3'-phosphate
  modified_base 8: mod_base = OTHER; note = 2'-O-methylcytidine-3'-phosphate
  modified_base 9: mod_base = OTHER; note = 2'-fluorocytidine-3'-phosphate
  modified_base 10: mod_base = OTHER; note = 2'-fluorouridine-3'-phosphate
  modified_base 11: mod_base = OTHER; note = 2'-fluoroadenosine-3'-phosphate
  modified_base 12: mod_base = OTHER; note = 2'-O-methylcytidine-3'-phosphate
  modified_base 13: mod_base = OTHER; note = 2'-O-methyluridine-3'-phosphate
  modified_base 14: mod_base = OTHER; note = 2'-O-methyladenosine-3'-phosphate
  modified_base 15: mod_base = OTHER; note = 2'-O-methylcytidine-3'-phosphate
  modified_base 16: mod_base = OTHER; note = 2'-O-methyladenosine-3'-phosphate
  modified_base 17: mod_base = OTHER; note = 2'-O-methyladenosine-3'-phosphate
  modified_base 18: mod_base = OTHER; note = 2'-O-methyluridine-3'-phosphate
  modified_base 19: mod_base = OTHER; note = 2'-O-methylguanosine-3'-phosphate
  modified_base 20: mod_base = OTHER; note = 2'-O-methyluridine-3'-phosphate
  modified_base 21: mod_base = OTHER; note = 2'-O-methyluridine-3'-phosphate N-[tris(GalNAc-alkyl)-amidodecanoyl)]-4-hydroxyprolinol (Hyp-(GalNAc-alkyl)3)
cggtctccctactacaatgtt

SEQ ID NO: 627 - RNA, 21 nt, synthetic construct
  misc_feature 1..21: note = Description of Artificial Sequence: Synthetic oligonucleotide
  source 1..21: mol_type = other RNA
  modified_base 1: mod_base = OTHER; note = 2'-O-methylguanosine-3'-phosphorothioate
  modified_base 2: mod_base = OTHER; note = 2'-O-methylguanosine-3'-phosphorothioate
  modified_base 3: mod_base = OTHER; note = 2'-O-methylguanosine-3'-phosphate
  modified_base 4: mod_base = OTHER; note = 2'-O-methyladenosine-3'-phosphate
  modified_base 5: mod_base = OTHER; note = 2'-O-methyluridine-3'-phosphate
  modified_base 6: mod_base = OTHER; note = 2'-O-methyluridine-3'-phosphate
  modified_base 7: mod_base = OTHER; note = 2'-fluoroguanosine-3'-phosphate
  modified_base 8: mod_base = OTHER; note = 2'-O-methyladenosine-3'-phosphate
  modified_base 9: mod_base = OTHER; note = 2'-fluoroadenosine-3'-phosphate
  modified_base 10: mod_base = OTHER; note = 2'-fluorouridine-3'-phosphate
  modified_base 11: mod_base = OTHER; note = 2'-fluorouridine-3'-phosphate
  modified_base 12: mod_base = OTHER; note = 2'-O-methyladenosine-3'-phosphate
  modified_base 13: mod_base = OTHER; note = 2'-O-methyladenosine-3'-phosphate
  modified_base 14: mod_base = OTHER; note = 2'-O-methyladenosine-3'-phosphate
  modified_base 15: mod_base = OTHER; note = 2'-O-methyladenosine-3'-phosphate
  modified_base 16: mod_base = OTHER; note = 2'-O-methylcytidine-3'-phosphate
  modified_base 17: mod_base = OTHER; note = 2'-O-methyladenosine-3'-phosphate
  modified_base 18: mod_base = OTHER; note = 2'-O-methylguanosine-3'-phosphate
  modified_base 19: mod_base = OTHER; note = 2'-O-methylcytidine-3'-phosphate
  modified_base 20: mod_base = OTHER; note = 2'-O-methyluridine-3'-phosphate
  modified_base 21: mod_base = OTHER; note = 2'-O-methyluridine-3'-phosphate N-[tris(GalNAc-alkyl)-amidodecanoyl)]-4-hydroxyprolinol (Hyp-(GalNAc-alkyl)3)
gggattgaattaaaacagctt

SEQ ID NO: 628 - RNA, 21 nt, synthetic construct
  misc_feature 1..21: note = Description of Artificial Sequence: Synthetic oligonucleotide
  source 1..21: mol_type = other RNA
  modified_base 1: mod_base = OTHER; note = 2'-O-methyladenosine-3'-phosphorothioate
  modified_base 2: mod_base = OTHER; note = 2'-O-methyladenosine-3'-phosphorothioate
  modified_base 3: mod_base = OTHER; note = 2'-O-methylcytidine-3'-phosphate
  modified_base 4: mod_base = OTHER; note = 2'-O-methylcytidine-3'-phosphate
  modified_base 5: mod_base = OTHER; note = 2'-O-methylcytidine-3'-phosphate
  modified_base 6: mod_base = OTHER; note = 2'-O-methyladenosine-3'-phosphate
  modified_base 7: mod_base = OTHER; note = 2'-fluoroadenosine-3'-phosphate
  modified_base 8: mod_base = OTHER; note = 2'-O-methylguanosine-3'-phosphate
  modified_base 9: mod_base = OTHER; note = 2'-fluoroguanosine-3'-phosphate
  modified_base 10: mod_base = OTHER; note = 2'-fluoroguanosine-3'-phosphate
  modified_base 11: mod_base = OTHER; note = 2'-fluoroadenosine-3'-phosphate
  modified_base 12: mod_base = OTHER; note = 2'-O-methylguanosine-3'-phosphate
  modified_base 13: mod_base = OTHER; note = 2'-O-methylguanosine-3'-phosphate
  modified_base 14: mod_base = OTHER; note = 2'-O-methyladenosine-3'-phosphate
  modified_base 15: mod_base = OTHER; note = 2'-O-methyluridine-3'-phosphate
  modified_base 16: mod_base = OTHER; note = 2'-O-methyluridine-3'-phosphate
  modified_base 17: mod_base = OTHER; note = 2'-O-methyladenosine-3'-phosphate
  modified_base 18: mod_base = OTHER; note = 2'-O-methyluridine-3'-phosphate
  modified_base 19: mod_base = OTHER; note = 2'-O-methylcytidine-3'-phosphate
  modified_base 20: mod_base = OTHER; note = 2'-O-methyluridine-3'-phosphate
  modified_base 21: mod_base = OTHER; note = 2'-O-methyluridine-3'-phosphate N-[tris(GalNAc-alkyl)-amidodecanoyl)]-4-hydroxyprolinol (Hyp-(GalNAc-alkyl)3)
aacccaagggaggattatctt

SEQ ID NO: 629 - RNA, 21 nt, synthetic construct
  misc_feature 1..21: note = Description of Artificial Sequence: Synthetic oligonucleotide
  source 1..21: mol_type = other RNA
  modified_base 1: mod_base = OTHER; note = 2'-O-methylguanosine-3'-phosphorothioate
  modified_base 2: mod_base = OTHER; note = 2'-O-methyluridine-3'-phosphorothioate
  modified_base 3: mod_base = OTHER; note = 2'-O-methylguanosine-3'-phosphate
  modified_base 4: mod_base = OTHER; note = 2'-O-methyladenosine-3'-phosphate
  modified_base 5: mod_base = OTHER; note = 2'-O-methylguanosine-3'-phosphate
  modified_base 6: mod_base = OTHER; note = 2'-O-methyluridine-3'-phosphate
  modified_base 7: mod_base = OTHER; note = 2'-fluoroguanosine-3'-phosphate
  modified_base 8: mod_base = OTHER; note = 2'-O-methyladenosine-3'-phosphate
  modified_base 9: mod_base = OTHER; note = 2'-fluorouridine-3'-phosphate
  modified_base 10: mod_base = OTHER; note = 2'-fluoroguanosine-3'-phosphate
  modified_base 11: mod_base = OTHER; note = 2'-fluoroadenosine-3'-phosphate
  modified_base 12: mod_base = OTHER; note = 2'-O-methylguanosine-3'-phosphate
  modified_base 13: mod_base = OTHER; note = 2'-O-methyladenosine-3'-phosphate
  modified_base 14: mod_base = OTHER; note = 2'-O-methyluridine-3'-phosphate
  modified_base 15: mod_base = OTHER; note = 2'-O-methylcytidine-3'-phosphate
  modified_base 16: mod_base = OTHER; note = 2'-O-methyluridine-3'-phosphate
  modified_base 17: mod_base = OTHER; note = 2'-O-methylcytidine-3'-phosphate
  modified_base 18: mod_base = OTHER; note = 2'-O-methyluridine-3'-phosphate
  modified_base 19: mod_base = OTHER; note = 2'-O-methyluridine-3'-phosphate
  modified_base 20: mod_base = OTHER; note = 2'-O-methyluridine-3'-phosphate
  modified_base 21: mod_base = OTHER; note = 2'-O-methyluridine-3'-phosphate N-[tris(GalNAc-alkyl)-amidodecanoyl)]-4-hydroxyprolinol (Hyp-(GalNAc-alkyl)3)
gtgagtgatgagatctctttt

SEQ ID NO: 630 - RNA, 21 nt, synthetic construct
  misc_feature 1..21: note = Description of Artificial Sequence: Synthetic oligonucleotide
  source 1..21: mol_type = other RNA
  modified_base 1: mod_base = OTHER; note = 2'-O-methyladenosine-3'-phosphorothioate
  modified_base 2: mod_base = OTHER; note = 2'-O-methylcytidine-3'-phosphorothioate
  modified_base 3: mod_base = OTHER; note = 2'-O-methyladenosine-3'-phosphate
  modified_base 4: mod_base = OTHER; note = 2'-O-methyluridine-3'-phosphate
  modified_base 5: mod_base = OTHER; note = 2'-O-methylguanosine-3'-phosphate
  modified_base 6: mod_base = OTHER; note = 2'-O-methyluridine-3'-phosphate
  modified_base 7: mod_base = OTHER; note = 2'-fluoroguanosine-3'-phosphate
  modified_base 8: mod_base = OTHER; note = 2'-O-methyluridine-3'-phosphate
  modified_base 9: mod_base = OTHER; note = 2'-fluorouridine-3'-phosphate
  modified_base 10: mod_base = OTHER; note = 2'-fluorocytidine-3'-phosphate
  modified_base 11: mod_base = OTHER; note = 2'-fluoroadenosine-3'-phosphate
  modified_base 12: mod_base = OTHER; note = 2'-O-methyladenosine-3'-phosphate
  modified_base 13: mod_base = OTHER; note = 2'-O-methyladenosine-3'-phosphate
  modified_base 14: mod_base = OTHER; note = 2'-O-methylguanosine-3'-phosphate
  modified_base 15: mod_base = OTHER; note = 2'-O-methyluridine-3'-phosphate
  modified_base 16: mod_base = OTHER; note = 2'-O-methylcytidine-3'-phosphate
  modified_base 17: mod_base = OTHER; note = 2'-O-methyladenosine-3'-phosphate
  modified_base 18: mod_base = OTHER; note = 2'-O-methyladenosine-3'-phosphate
  modified_base 19: mod_base = OTHER; note = 2'-O-methylguanosine-3'-phosphate
  modified_base 20: mod_base = OTHER; note = 2'-O-methylguanosine-3'-phosphate
  modified_base 21: mod_base = OTHER; note = 2'-O-methyluridine-3'-phosphate N-[tris(GalNAc-alkyl)-amidodecanoyl)]-4-hydroxyprolinol (Hyp-(GalNAc-alkyl)3)
acatgtgttcaaagtcaaggt

SEQ ID NO: 631 - RNA, 21 nt, synthetic construct
  misc_feature 1..21: note = Description of Artificial Sequence: Synthetic oligonucleotide
  source 1..21: mol_type = other RNA
  modified_base 1: mod_base = OTHER; note = 2'-O-methyladenosine-3'-phosphorothioate
  modified_base 2: mod_base = OTHER; note = 2'-O-methylguanosine-3'-phosphorothioate
  modified_base 3: mod_base = OTHER; note = 2'-O-methyluridine-3'-phosphate
  modified_base 4: mod_base = OTHER; note = 2'-O-methylguanosine-3'-phosphate
  modified_base 5: mod_base = OTHER; note = 2'-O-methyluridine-3'-phosphate
  modified_base 6: mod_base = OTHER; note = 2'-O-methylcytidine-3'-phosphate
  modified_base 7: mod_base = OTHER; note = 2'-fluorouridine-3'-phosphate
  modified_base 8: mod_base = OTHER; note = 2'-O-methyladenosine-3'-phosphate
  modified_base 9: mod_base = OTHER; note = 2'-fluoroguanosine-3'-phosphate
  modified_base 10: mod_base = OTHER; note = 2'-fluorouridine-3'-phosphate
  modified_base 11: mod_base = OTHER; note = 2'-fluorocytidine-3'-phosphate
  modified_base 12: mod_base = OTHER; note = 2'-O-methyladenosine-3'-phosphate
  modified_base 13: mod_base = OTHER; note = 2'-O-methyladenosine-3'-phosphate
  modified_base 14: mod_base = OTHER; note = 2'-O-methylcytidine-3'-phosphate
  modified_base 15: mod_base = OTHER; note = 2'-O-methyluridine-3'-phosphate
  modified_base 16: mod_base = OTHER; note = 2'-O-methyluridine-3'-phosphate
  modified_base 17: mod_base = OTHER; note = 2'-O-methyladenosine-3'-phosphate
  modified_base 18: mod_base = OTHER; note = 2'-O-methyladenosine-3'-phosphate
  modified_base 19: mod_base = OTHER; note = 2'-O-methyluridine-3'-phosphate
  modified_base 20: mod_base = OTHER; note = 2'-O-methyluridine-3'-phosphate
  modified_base 21: mod_base = OTHER; note = 2'-O-methyluridine-3'-phosphate N-[tris(GalNAc-alkyl)-amidodecanoyl)]-4-hydroxyprolinol (Hyp-(GalNAc-alkyl)3)
agtgtctagtcaacttaattt

SEQ ID NO: 632 - RNA, 21 nt, synthetic construct
  misc_feature 1..21: note = Description of Artificial Sequence: Synthetic oligonucleotide
  source 1..21: mol_type = other RNA
  modified_base 1: mod_base = OTHER; note = 2'-O-methylguanosine-3'-phosphorothioate
  modified_base 2: mod_base = OTHER; note = 2'-O-methylguanosine-3'-phosphorothioate
  modified_base 3: mod_base = OTHER; note = 2'-O-methylguanosine-3'-phosphate
  modified_base 4: mod_base = OTHER; note = 2'-O-methylcytidine-3'-phosphate
  modified_base 5: mod_base = OTHER; note = 2'-O-methylguanosine-3'-phosphate
  modified_base 6: mod_base = OTHER; note = 2'-O-methyluridine-3'-phosphate
  modified_base 7: mod_base = OTHER; note = 2'-fluoroguanosine-3'-phosphate
  modified_base 8: mod_base = OTHER; note = 2'-O-methylguanosine-3'-phosphate
  modified_base 9: mod_base = OTHER; note = 2'-fluoroguanosine-3'-phosphate
  modified_base 10: mod_base = OTHER; note = 2'-fluoroadenosine-3'-phosphate
  modified_base 11: mod_base = OTHER; note = 2'-fluorouridine-3'-phosphate
  modified_base 12: mod_base = OTHER; note = 2'-O-methyluridine-3'-phosphate
  modified_base 13: mod_base = OTHER; note = 2'-O-methylguanosine-3'-phosphate
  modified_base 14: mod_base = OTHER; note = 2'-O-methyladenosine-3'-phosphate
  modified_base 15: mod_base = OTHER; note = 2'-O-methyladenosine-3'-phosphate
  modified_base 16: mod_base = OTHER; note = 2'-O-methyluridine-3'-phosphate
  modified_base 17: mod_base = OTHER; note = 2'-O-methyluridine-3'-phosphate
  modified_base 18: mod_base = OTHER; note = 2'-O-methyladenosine-3'-phosphate
  modified_base 19: mod_base = OTHER; note = 2'-O-methyladenosine-3'-phosphate
  modified_base 20: mod_base = OTHER; note = 2'-O-methyladenosine-3'-phosphate
  modified_base 21: mod_base = OTHER; note = 2'-O-methyluridine-3'-phosphate N-[tris(GalNAc-alkyl)-amidodecanoyl)]-4-hydroxyprolinol (Hyp-(GalNAc-alkyl)3)
gggcgtgggattgaattaaat

SEQ ID NO: 633 - RNA, 21 nt, synthetic construct
  misc_feature 1..21: note = Description of Artificial Sequence: Synthetic oligonucleotide
  source 1..21: mol_type = other RNA
  modified_base 1: mod_base = OTHER; note = 2'-O-methylcytidine-3'-phosphorothioate
  modified_base 2: mod_base = OTHER; note = 2'-O-methyladenosine-3'-phosphorothioate
  modified_base 3: mod_base = OTHER; note = 2'-O-methyladenosine-3'-phosphate
  modified_base 4: mod_base = OTHER; note = 2'-O-methylguanosine-3'-phosphate
  modified_base 5: mod_base = OTHER; note = 2'-O-methyluridine-3'-phosphate
  modified_base 6: mod_base = OTHER; note = 2'-O-methylguanosine-3'-phosphate
  modified_base 7: mod_base = OTHER; note = 2'-fluoroadenosine-3'-phosphate
  modified_base 8: mod_base = OTHER; note = 2'-O-methyladenosine-3'-phosphate
  modified_base 9: mod_base = OTHER; note = 2'-fluorocytidine-3'-phosphate
  modified_base 10: mod_base = OTHER; note = 2'-fluoroadenosine-3'-phosphate
  modified_base 11: mod_base = OTHER; note = 2'-fluorouridine-3'-phosphate
  modified_base 12: mod_base = OTHER; note = 2'-O-methylcytidine-3'-phosphate
  modified_base 13: mod_base = OTHER; note = 2'-O-methyladenosine-3'-phosphate
  modified_base 14: mod_base = OTHER; note = 2'-O-methyladenosine-3'-phosphate
  modified_base 15: mod_base = OTHER; note = 2'-O-methyluridine-3'-phosphate
  modified_base 16: mod_base = OTHER; note = 2'-O-methylguanosine-3'-phosphate
  modified_base 17: mod_base = OTHER; note = 2'-O-methylcytidine-3'-phosphate
  modified_base 18: mod_base = OTHER; note = 2'-O-methyluridine-3'-phosphate
  modified_base 19: mod_base = OTHER; note = 2'-O-methyluridine-3'-phosphate
  modified_base 20: mod_base = OTHER; note = 2'-O-methyluridine-3'-phosphate
  modified_base 21: mod_base = OTHER; note = 2'-O-methyluridine-3'-phosphate N-[tris(GalNAc-alkyl)-amidodecanoyl)]-4-hydroxyprolinol (Hyp-(GalNAc-alkyl)3)
caagtgaacatcaatgctttt

SEQ ID NO: 634 - RNA, 21 nt, synthetic construct
  misc_feature 1..21: note = Description of Artificial Sequence: Synthetic oligonucleotide
  source 1..21: mol_type = other RNA
  modified_base 1: mod_base = OTHER; note = 2'-O-methyladenosine-3'-phosphorothioate
  modified_base 2: mod_base = OTHER; note = 2'-O-methyluridine-3'-phosphorothioate
  modified_base 3: mod_base = OTHER; note = 2'-O-methyluridine-3'-phosphate
  modified_base 4: mod_base = OTHER; note = 2'-O-methylcytidine-3'-phosphate
  modified_base 5: mod_base = OTHER; note = 2'-O-methylcytidine-3'-phosphate
  modified_base 6: mod_base = OTHER; note = 2'-O-methyluridine-3'-phosphate
  modified_base 7: mod_base = OTHER; note = 2'-fluoroguanosine-3'-phosphate
  modified_base 8: mod_base = OTHER; note = 2'-O-methyladenosine-3'-phosphate
  modified_base 9: mod_base = OTHER; note = 2'-fluoroadenosine-3'-phosphate
  modified_base 10: mod_base = OTHER; note = 2'-fluorouridine-3'-phosphate
  modified_base 11: mod_base = OTHER; note = 2'-fluorouridine-3'-phosphate
  modified_base 12: mod_base = OTHER; note = 2'-O-methyluridine-3'-phosphate
  modified_base 13: mod_base = OTHER; note = 2'-O-methyluridine-3'-phosphate
  modified_base 14: mod_base = OTHER; note = 2'-O-methyladenosine-3'-phosphate
  modified_base 15: mod_base = OTHER; note = 2'-O-methyluridine-3'-phosphate
  modified_base 16: mod_base = OTHER; note = 2'-O-methylguanosine-3'-phosphate
  modified_base 17: mod_base = OTHER; note = 2'-O-methyladenosine-3'-phosphate
  modified_base 18: mod_base = OTHER; note = 2'-O-methylcytidine-3'-phosphate
  modified_base 19: mod_base = OTHER; note = 2'-O-methyluridine-3'-phosphate
  modified_base 20: mod_base = OTHER; note = 2'-O-methyladenosine-3'-phosphate
  modified_base 21: mod_base = OTHER; note = 2'-O-methyluridine-3'-phosphate N-[tris(GalNAc-alkyl)-amidodecanoyl)]-4-hydroxyprolinol (Hyp-(GalNAc-alkyl)3)
attcctgaattttatgactat

SEQ ID NO: 635 - RNA, 21 nt, synthetic construct
  misc_feature 1..21: note = Description of Artificial Sequence: Synthetic oligonucleotide
  source 1..21: mol_type = other RNA
  modified_base 1: mod_base = OTHER; note = 2'-O-methylcytidine-3'-phosphorothioate
  modified_base 2: mod_base = OTHER; note = 2'-O-methyluridine-3'-phosphorothioate
  modified_base 3: mod_base = OTHER; note = 2'-O-methylcytidine-3'-phosphate
  modified_base 4: mod_base = OTHER; note = 2'-O-methyladenosine-3'-phosphate
  modified_base 5: mod_base = OTHER; note = 2'-O-methyladenosine-3'-phosphate
  modified_base 6: mod_base = OTHER; note = 2'-O-methyluridine-3'-phosphate
  modified_base 7: mod_base = OTHER; note = 2'-fluoroguanosine-3'-phosphate
  modified_base 8: mod_base = OTHER; note = 2'-O-methyladenosine-3'-phosphate
  modified_base 9: mod_base = OTHER; note = 2'-fluoroadenosine-3'-phosphate
  modified_base 10: mod_base = OTHER; note = 2'-fluoroadenosine-3'-phosphate
  modified_base 11: mod_base = OTHER; note = 2'-fluorouridine-3'-phosphate
  modified_base 12: mod_base = OTHER; note = 2'-O-methylcytidine-3'-phosphate
  modified_base 13: mod_base = OTHER; note = 2'-O-methyladenosine-3'-phosphate
  modified_base 14: mod_base = OTHER; note = 2'-O-methyladenosine-3'-phosphate
  modified_base 15: mod_base = OTHER; note = 2'-O-methyluridine-3'-phosphate
  modified_base 16: mod_base = OTHER; note = 2'-O-methyluridine-3'-phosphate
  modified_base 17: mod_base = OTHER; note = 2'-O-methyladenosine-3'-phosphate
  modified_base 18: mod_base = OTHER; note = 2'-O-methyluridine-3'-phosphate
  modified_base 19: mod_base = OTHER; note = 2'-O-methylguanosine-3'-phosphate
  modified_base 20: mod_base = OTHER; note = 2'-O-methyladenosine-3'-phosphate
  modified_base 21: mod_base = OTHER; note = 2'-O-methyluridine-3'-phosphate N-[tris(GalNAc-alkyl)-amidodecanoyl)]-4-hydroxyprolinol (Hyp-(GalNAc-alkyl)3)
ctcaatgaaatcaattatgat

SEQ ID NO: 636 - RNA, 21 nt, synthetic construct
  misc_feature 1..21: note = Description of Artificial Sequence: Synthetic oligonucleotide
  source 1..21: mol_type = other RNA
  modified_base 1: mod_base = OTHER; note = 2'-O-methylguanosine-3'-phosphorothioate
  modified_base 2: mod_base = OTHER; note = 2'-O-methylguanosine-3'-phosphorothioate
  modified_base 3: mod_base = OTHER; note = 2'-O-methyladenosine-3'-phosphate
  modified_base 4: mod_base = OTHER; note = 2'-O-methyluridine-3'-phosphate
  modified_base 5: mod_base = OTHER; note = 2'-O-methylguanosine-3'-phosphate
  modified_base 6: mod_base = OTHER; note = 2'-O-methyluridine-3'-phosphate
  modified_base 7: mod_base = OTHER; note = 2'-fluorouridine-3'-phosphate
  modified_base 8: mod_base = OTHER; note = 2'-O-methylcytidine-3'-phosphate
  modified_base 9: mod_base = OTHER; note = 2'-fluorocytidine-3'-phosphate
  modified_base 10: mod_base = OTHER; note = 2'-fluoroguanosine-3'-phosphate
  modified_base 11: mod_base = OTHER; note = 2'-fluoroguanosine-3'-phosphate
  modified_base 12: mod_base = OTHER; note = 2'-O-methylguanosine-3'-phosphate
  modified_base 13: mod_base = OTHER; note = 2'-O-methyladenosine-3'-phosphate
  modified_base 14: mod_base = OTHER; note = 2'-O-methyladenosine-3'-phosphate
  modified_base 15: mod_base = OTHER; note = 2'-O-methyladenosine-3'-phosphate
  modified_base 16: mod_base = OTHER; note = 2'-O-methylguanosine-3'-phosphate
  modified_base 17: mod_base = OTHER; note = 2'-O-methyluridine-3'-phosphate
  modified_base 18: mod_base = OTHER; note = 2'-O-methylguanosine-3'-phosphate
  modified_base 19: mod_base = OTHER; note = 2'-O-methyladenosine-3'-phosphate
  modified_base 20: mod_base = OTHER; note = 2'-O-methyluridine-3'-phosphate
  modified_base 21: mod_base = OTHER; note = 2'-O-methyluridine-3'-phosphate N-[tris(GalNAc-alkyl)-amidodecanoyl)]-4-hydroxyprolinol (Hyp-(GalNAc-alkyl)3)
ggatgttccgggaaagtgatt

SEQ ID NO: 637 - RNA, 21 nt, synthetic construct
  misc_feature 1..21: note = Description of Artificial Sequence: Synthetic oligonucleotide
  source 1..21: mol_type = other RNA
  modified_base 1: mod_base = OTHER; note = 2'-O-methylguanosine-3'-phosphorothioate
  modified_base 2: mod_base = OTHER; note = 2'-O-methyladenosine-3'-phosphorothioate
  modified_base 3: mod_base = OTHER; note = 2'-O-methyluridine-3'-phosphate
  modified_base 4: mod_base = OTHER; note = 2'-O-methyladenosine-3'-phosphate
  modified_base 5: mod_base = OTHER; note = 2'-O-methyluridine-3'-phosphate
  modified_base 6: mod_base = OTHER; note = 2'-O-methylguanosine-3'-phosphate
  modified_base 7: mod_base = OTHER; note = 2'-fluoroguanosine-3'-phosphate
  modified_base 8: mod_base = OTHER; note = 2'-O-methyluridine-3'-phosphate
  modified_base 9: mod_base = OTHER; note = 2'-fluorocytidine-3'-phosphate
  modified_base 10: mod_base = OTHER; note = 2'-fluorouridine-3'-phosphate
  modified_base 11: mod_base = OTHER; note = 2'-fluoroadenosine-3'-phosphate
  modified_base 12: mod_base = OTHER; note = 2'-O-methylguanosine-3'-phosphate
  modified_base 13: mod_base = OTHER; note = 2'-O-methyluridine-3'-phosphate
  modified_base 14: mod_base = OTHER; note = 2'-O-methylguanosine-3'-phosphate
  modified_base 15: mod_base = OTHER; note = 2'-O-methyladenosine-3'-phosphate
  modified_base 16: mod_base = OTHER; note = 2'-O-methylcytidine-3'-phosphate
  modified_base 17: mod_base = OTHER; note = 2'-O-methyladenosine-3'-phosphate
  modified_base 18: mod_base = OTHER; note = 2'-O-methyluridine-3'-phosphate
  modified_base 19: mod_base = OTHER; note = 2'-O-methyladenosine-3'-phosphate
  modified_base 20: mod_base = OTHER; note = 2'-O-methyluridine-3'-phosphate
  modified_base 21: mod_base = OTHER; note = 2'-O-methyluridine-3'-phosphate N-[tris(GalNAc-alkyl)-amidodecanoyl)]-4-hydroxyprolinol (Hyp-(GalNAc-alkyl)3)
gatatggtctagtgacatatt

SEQ ID NO: 638 - RNA, 21 nt, synthetic construct
  misc_feature 1..21: note = Description of Artificial Sequence: Synthetic oligonucleotide
  source 1..21: mol_type = other RNA
  modified_base 1: mod_base = OTHER; note = 2'-O-methylguanosine-3'-phosphorothioate
  modified_base 2: mod_base = OTHER; note = 2'-O-methylcytidine-3'-phosphorothioate
  modified_base 3: mod_base = OTHER; note = 2'-O-methylguanosine-3'-phosphate
  modified_base 4: mod_base = OTHER; note = 2'-O-methyluridine-3'-phosphate
  modified_base 5: mod_base = OTHER; note = 2'-O-methylguanosine-3'-phosphate
  modified_base 6: mod_base = OTHER; note = 2'-O-methylguanosine-3'-phosphate
  modified_base 7: mod_base = OTHER; note = 2'-fluoroguanosine-3'-phosphate
  modified_base 8: mod_base = OTHER; note = 2'-O-methyladenosine-3'-phosphate
  modified_base 9: mod_base = OTHER; note = 2'-fluorouridine-3'-phosphate
  modified_base 10: mod_base = OTHER; note = 2'-fluorouridine-3'-phosphate
  modified_base 11: mod_base = OTHER; note = 2'-fluoroguanosine-3'-phosphate
  modified_base 12: mod_base = OTHER; note = 2'-O-methyladenosine-3'-phosphate
  modified_base 13: mod_base = OTHER; note = 2'-O-methyladenosine-3'-phosphate
  modified_base 14: mod_base = OTHER; note = 2'-O-methyluridine-3'-phosphate
  modified_base 15: mod_base = OTHER; note = 2'-O-methyluridine-3'-phosphate
  modified_base 16: mod_base = OTHER; note = 2'-O-methyladenosine-3'-phosphate
  modified_base 17: mod_base = OTHER; note = 2'-O-methyladenosine-3'-phosphate
  modified_base 18: mod_base = OTHER; note = 2'-O-methyladenosine-3'-phosphate
  modified_base 19: mod_base = OTHER; note = 2'-O-methyladenosine-3'-phosphate
  modified_base 20: mod_base = OTHER; note = 2'-O-methylcytidine-3'-phosphate
  modified_base 21: mod_base = OTHER; note = 2'-O-methyluridine-3'-phosphate N-[tris(GalNAc-alkyl)-amidodecanoyl)]-4-hydroxyprolinol (Hyp-(GalNAc-alkyl)3)
gcgtgggattgaattaaaact

SEQ ID NO: 639 - RNA, 21 nt, synthetic construct
  misc_feature 1..21: note = Description of Artificial Sequence: Synthetic oligonucleotide
  source 1..21: mol_type = other RNA
  modified_base 1: mod_base = OTHER; note = 2'-O-methyladenosine-3'-phosphorothioate
  modified_base 2: mod_base = OTHER; note = 2'-O-methyladenosine-3'-phosphorothioate
  modified_base 3: mod_base = OTHER; note = 2'-O-methyladenosine-3'-phosphate
  modified_base 4: mod_base = OTHER; note = 2'-O-methylguanosine-3'-phosphate
  modified_base 5: mod_base = OTHER; note = 2'-O-methyluridine-3'-phosphate
  modified_base 6: mod_base = OTHER; note = 2'-O-methylguanosine-3'-phosphate
  modified_base 7: mod_base = OTHER; note = 2'-fluorouridine-3'-phosphate
  modified_base 8: mod_base = OTHER; note = 2'-O-methylcytidine-3'-phosphate
  modified_base 9: mod_base = OTHER; note = 2'-fluorouridine-3'-phosphate
  modified_base 10: mod_base = OTHER; note = 2'-fluoroadenosine-3'-phosphate
  modified_base 11: mod_base = OTHER; note = 2'-fluoroguanosine-3'-phosphate
  modified_base 12: mod_base = OTHER; note = 2'-O-methyluridine-3'-phosphate
  modified_base 13: mod_base = OTHER; note = 2'-O-methylcytidine-3'-phosphate
  modified_base 14: mod_base = OTHER; note = 2'-O-methyladenosine-3'-phosphate
  modified_base 15: mod_base = OTHER; note = 2'-O-methyladenosine-3'-phosphate
  modified_base 16: mod_base = OTHER; note = 2'-O-methylcytidine-3'-phosphate
  modified_base 17: mod_base = OTHER; note = 2'-O-methyluridine-3'-phosphate
  modified_base 18: mod_base = OTHER; note = 2'-O-methyluridine-3'-phosphate
  modified_base 19: mod_base = OTHER; note = 2'-O-methyladenosine-3'-phosphate
  modified_base 20: mod_base = OTHER; note = 2'-O-methyladenosine-3'-phosphate
  modified_base 21: mod_base = OTHER; note = 2'-O-methyluridine-3'-phosphate N-[tris(GalNAc-alkyl)-amidodecanoyl)]-4-hydroxyprolinol (Hyp-(GalNAc-alkyl)3)
aaagtgtctagtcaacttaat

SEQ ID NO: 640 - RNA, 21 nt, synthetic construct
  misc_feature 1..21: note = Description of Artificial Sequence: Synthetic oligonucleotide
  source 1..21: mol_type = other RNA
  modified_base 1: mod_base = OTHER; note = 2'-O-methyladenosine-3'-phosphorothioate
  modified_base 2: mod_base = OTHER; note = 2'-O-methylguanosine-3'-phosphorothioate
  modified_base 3: mod_base = OTHER; note = 2'-O-methylcytidine-3'-phosphate
  modified_base 4: mod_base = OTHER; note = 2'-O-methyluridine-3'-phosphate
  modified_base 5: mod_base = OTHER; note = 2'-O-methylcytidine-3'-phosphate
  modified_base 6: mod_base = OTHER; note = 2'-O-methyladenosine-3'-phosphate
  modified_base 7: mod_base = OTHER; note = 2'-fluoroadenosine-3'-phosphate
  modified_base 8: mod_base = OTHER; note = 2'-O-methyluridine-3'-phosphate
  modified_base 9: mod_base = OTHER; note = 2'-fluoroguanosine-3'-phosphate
  modified_base 10: mod_base = OTHER; note = 2'-fluoroadenosine-3'-phosphate
  modified_base 11: mod_base = OTHER; note = 2'-fluoroadenosine-3'-phosphate
  modified_base 12: mod_base = OTHER; note = 2'-O-methyladenosine-3'-phosphate
  modified_base 13: mod_base = OTHER; note = 2'-O-methyluridine-3'-phosphate
  modified_base 14: mod_base = OTHER; note = 2'-O-methylcytidine-3'-phosphate
  modified_base 15: mod_base = OTHER; note = 2'-O-methyladenosine-3'-phosphate
  modified_base 16: mod_base = OTHER; note = 2'-O-methyladenosine-3'-phosphate
  modified_base 17: mod_base = OTHER; note = 2'-O-methyluridine-3'-phosphate
  modified_base 18: mod_base = OTHER; note = 2'-O-methyluridine-3'-phosphate
  modified_base 19: mod_base = OTHER; note = 2'-O-methyladenosine-3'-phosphate
  modified_base 20: mod_base = OTHER; note = 2'-O-methyluridine-3'-phosphate
  modified_base 21: mod_base = OTHER; note = 2'-O-methyluridine-3'-phosphate N-[tris(GalNAc-alkyl)-amidodecanoyl)]-4-hydroxyprolinol (Hyp-(GalNAc-alkyl)3)
agctcaatgaaatcaattatt

SEQ ID NO: 641 - RNA, 21 nt, synthetic construct
  misc_feature 1..21: note = Description of Artificial Sequence: Synthetic oligonucleotide
  source 1..21: mol_type = other RNA
  modified_base 1: mod_base = OTHER; note = 2'-O-methylcytidine-3'-phosphorothioate
  modified_base 2: mod_base = OTHER; note = 2'-O-methyladenosine-3'-phosphorothioate
  modified_base 3: mod_base = OTHER; note = 2'-O-methyladenosine-3'-phosphate
  modified_base 4: mod_base = OTHER; note = 2'-O-methyluridine-3'-phosphate
  modified_base 5: mod_base = OTHER; note = 2'-O-methylguanosine-3'-phosphate
  modified_base 6: mod_base = OTHER; note = 2'-O-methyladenosine-3'-phosphate
  modified_base 7: mod_base = OTHER; note = 2'-fluoroadenosine-3'-phosphate
  modified_base 8: mod_base = OTHER; note = 2'-O-methyladenosine-3'-phosphate
  modified_base 9: mod_base = OTHER; note = 2'-fluorouridine-3'-phosphate
  modified_base 10: mod_base = OTHER; note = 2'-fluorocytidine-3'-phosphate
  modified_base 11: mod_base = OTHER; note = 2'-fluoroadenosine-3'-phosphate
  modified_base 12: mod_base = OTHER; note = 2'-O-methyladenosine-3'-phosphate
  modified_base 13: mod_base = OTHER; note = 2'-O-methyluridine-3'-phosphate
  modified_base 14: mod_base = OTHER; note = 2'-O-methyluridine-3'-phosphate
  modified_base 15: mod_base = OTHER; note = 2'-O-methyladenosine-3'-phosphate
  modified_base 16: mod_base = OTHER; note = 2'-O-methyluridine-3'-phosphate
  modified_base 17: mod_base = OTHER; note = 2'-O-methylguanosine-3'-phosphate
  modified_base 18: mod_base = OTHER; note = 2'-O-methyladenosine-3'-phosphate
  modified_base 19: mod_base = OTHER; note = 2'-O-methyladenosine-3'-phosphate
  modified_base 20: mod_base = OTHER; note = 2'-O-methylguanosine-3'-phosphate
  modified_base 21: mod_base = OTHER; note = 2'-O-methyluridine-3'-phosphate N-[tris(GalNAc-alkyl)-amidodecanoyl)]-4-hydroxyprolinol (Hyp-(GalNAc-alkyl)3)
caatgaaatcaattatgaagt

SEQ ID NO: 642 - RNA, 21 nt, synthetic construct
  misc_feature 1..21: note = Description of Artificial Sequence: Synthetic oligonucleotide
  source 1..21: mol_type = other RNA
  modified_base 1: mod_base = OTHER; note = 2'-O-methylguanosine-3'-phosphorothioate
  modified_base 2: mod_base = OTHER; note = 2'-O-methyluridine-3'-phosphorothioate
  modified_base 3: mod_base = OTHER; note = 2'-O-methylguanosine-3'-phosphate
  modified_base 4: mod_base = OTHER; note = 2'-O-methylguanosine-3'-phosphate
  modified_base 5: mod_base = OTHER; note = 2'-O-methylguanosine-3'-phosphate
  modified_base 6: mod_base = OTHER; note = 2'-O-methyladenosine-3'-phosphate
  modified_base 7: mod_base = OTHER; note = 2'-fluorouridine-3'-phosphate
  modified_base 8: mod_base = OTHER; note = 2'-O-methyluridine-3'-phosphate
  modified_base 9: mod_base = OTHER; note = 2'-fluoroguanosine-3'-phosphate
  modified_base 10: mod_base = OTHER; note = 2'-fluoroadenosine-3'-phosphate
  modified_base 11: mod_base = OTHER; note = 2'-fluoroadenosine-3'-phosphate
  modified_base 12: mod_base = OTHER; note = 2'-O-methyluridine-3'-phosphate
  modified_base 13: mod_base = OTHER; note = 2'-O-methyluridine-3'-phosphate
  modified_base 14: mod_base = OTHER; note = 2'-O-methyladenosine-3'-phosphate
  modified_base 15: mod_base = OTHER; note = 2'-O-methyladenosine-3'-phosphate
  modified_base 16: mod_base = OTHER; note = 2'-O-methyladenosine-3'-phosphate
  modified_base 17: mod_base = OTHER; note = 2'-O-methyladenosine-3'-phosphate
  modified_base 18: mod_base = OTHER; note = 2'-O-methylcytidine-3'-phosphate
  modified_base 19: mod_base = OTHER; note = 2'-O-methyladenosine-3'-phosphate
  modified_base 20: mod_base = OTHER; note = 2'-O-methylguanosine-3'-phosphate
  modified_base 21: mod_base = OTHER; note = 2'-O-methyluridine-3'-phosphate N-[tris(GalNAc-alkyl)-amidodecanoyl)]-4-hydroxyprolinol (Hyp-(GalNAc-alkyl)3)
gtgggattgaattaaaacagt

SEQ ID NO: 643 - RNA, 21 nt, synthetic construct
  misc_feature 1..21: note = Description of Artificial Sequence: Synthetic oligonucleotide
  source 1..21: mol_type = other RNA
  modified_base 1: mod_base = OTHER; note = 2'-O-methyladenosine-3'-phosphorothioate
  modified_base 2: mod_base = OTHER; note = 2'-O-methyladenosine-3'-phosphorothioate
  modified_base 3: mod_base = OTHER; note = 2'-O-methylguanosine-3'-phosphate
  modified_base 4: mod_base = OTHER; note = 2'-O-methylcytidine-3'-phosphate
  modified_base 5: mod_base = OTHER; note = 2'-O-methyladenosine-3'-phosphate
  modified_base 6: mod_base = OTHER; note = 2'-O-methylguanosine-3'-phosphate
  modified_base 7: mod_base = OTHER; note = 2'-fluoroguanosine-3'-phosphate
  modified_base 8: mod_base = OTHER; note = 2'-O-methyladenosine-3'-phosphate
  modified_base 9: mod_base = OTHER; note = 2'-fluoroadenosine-3'-phosphate
  modified_base 10: mod_base = OTHER; note = 2'-fluorouridine-3'-phosphate
  modified_base 11: mod_base = OTHER; note = 2'-fluorouridine-3'-phosphate
  modified_base 12: mod_base = OTHER; note = 2'-O-methylcytidine-3'-phosphate
  modified_base 13: mod_base = OTHER; note = 2'-O-methylcytidine-3'-phosphate
  modified_base 14: mod_base = OTHER; note = 2'-O-methyluridine-3'-phosphate
  modified_base 15: mod_base = OTHER; note = 2'-O-methylguanosine-3'-phosphate
  modified_base 16: mod_base = OTHER; note = 2'-O-methyladenosine-3'-phosphate
  modified_base 17: mod_base = OTHER; note = 2'-O-methyladenosine-3'-phosphate
  modified_base 18: mod_base = OTHER; note = 2'-O-methyluridine-3'-phosphate
  modified_base 19: mod_base = OTHER; note = 2'-O-methyluridine-3'-phosphate
  modified_base 20: mod_base = OTHER; note = 2'-O-methyluridine-3'-phosphate
  modified_base 21: mod_base = OTHER; note = 2'-O-methyluridine-3'-phosphate N-[tris(GalNAc-alkyl)-amidodecanoyl)]-4-hydroxyprolinol (Hyp-(GalNAc-alkyl)3)
aagcaggaattcctgaatttt

SEQ ID NO: 644 - RNA, 21 nt, synthetic construct
  misc_feature 1..21: note = Description of Artificial Sequence: Synthetic oligonucleotide
  source 1..21: mol_type = other RNA
  modified_base 1: mod_base = OTHER; note = 2'-O-methyluridine-3'-phosphorothioate
  modified_base 2: mod_base = OTHER; note = 2'-O-methylguanosine-3'-phosphorothioate
  modified_base 3: mod_base = OTHER; note = 2'-O-methylguanosine-3'-phosphate
  modified_base 4: mod_base = OTHER; note = 2'-O-methylguanosine-3'-phosphate
  modified_base 5: mod_base = OTHER; note = 2'-O-methyladenosine-3'-phosphate
  modified_base 6: mod_base = OTHER; note = 2'-O-methyluridine-3'-phosphate
  modified_base 7: mod_base = OTHER; note = 2'-fluorouridine-3'-phosphate
  modified_base 8: mod_base = OTHER; note = 2'-O-methylguanosine-3'-phosphate
  modified_base 9: mod_base = OTHER; note = 2'-fluoroadenosine-3'-phosphate
  modified_base 10: mod_base = OTHER; note = 2'-fluoroadenosine-3'-phosphate
  modified_base 11: mod_base = OTHER; note = 2'-fluorouridine-3'-phosphate
  modified_base 12: mod_base = OTHER; note = 2'-O-methyluridine-3'-phosphate
  modified_base 13: mod_base = OTHER; note = 2'-O-methyladenosine-3'-phosphate
  modified_base 14: mod_base = OTHER; note = 2'-O-methyladenosine-3'-phosphate
  modified_base 15: mod_base = OTHER; note = 2'-O-methyladenosine-3'-phosphate
  modified_base 16: mod_base = OTHER; note = 2'-O-methyladenosine-3'-phosphate
  modified_base 17: mod_base = OTHER; note = 2'-O-methylcytidine-3'-phosphate
  modified_base 18: mod_base = OTHER; note = 2'-O-methyladenosine-3'-phosphate
  modified_base 19: mod_base = OTHER; note = 2'-O-methylguanosine-3'-phosphate
  modified_base 20: mod_base = OTHER; note = 2'-O-methylcytidine-3'-phosphate
  modified_base 21: mod_base = OTHER; note = 2'-O-methyluridine-3'-phosphate N-[tris(GalNAc-alkyl)-amidodecanoyl)]-4-hydroxyprolinol (Hyp-(GalNAc-alkyl)3)
tgggattgaattaaaacagct

SEQ ID NO: 645 - RNA, 21 nt, synthetic construct
  misc_feature 1..21: note = Description of Artificial Sequence: Synthetic oligonucleotide
  source 1..21: mol_type = other RNA
  modified_base 1: mod_base = OTHER; note = 2'-O-methyladenosine-3'-phosphorothioate
  modified_base 2: mod_base = OTHER; note = 2'-O-methylcytidine-3'-phosphorothioate
  modified_base 3: mod_base = OTHER; note = 2'-O-methylcytidine-3'-phosphate
  modified_base 4: mod_base = OTHER; note = 2'-O-methylcytidine-3'-phosphate
  modified_base 5: mod_base = OTHER; note = 2'-O-methyladenosine-3'-phosphate
  modified_base 6: mod_base = OTHER; note = 2'-O-methyladenosine-3'-phosphate
  modified_base 7: mod_base = OTHER; note = 2'-fluorouridine-3'-phosphate
  modified_base 8: mod_base = OTHER; note = 2'-O-methyluridine-3'-phosphate
  modified_base 9: mod_base = OTHER; note = 2'-fluoroadenosine-3'-phosphate
  modified_base 10: mod_base = OTHER; note = 2'-fluorocytidine-3'-phosphate
  modified_base 11: mod_base = OTHER; note = 2'-fluorouridine-3'-phosphate
  modified_base 12: mod_base = OTHER; note = 2'-O-methylguanosine-3'-phosphate
  modified_base 13: mod_base = OTHER; note = 2'-O-methyluridine-3'-phosphate
  modified_base 14: mod_base = OTHER; note = 2'-O-methylcytidine-3'-phosphate
  modified_base 15: mod_base = OTHER; note = 2'-O-methyladenosine-3'-phosphate
  modified_base 16: mod_base = OTHER; note = 2'-O-methyluridine-3'-phosphate
  modified_base 17: mod_base = OTHER; note = 2'-O-methyluridine-3'-phosphate
  modified_base 18: mod_base = OTHER; note = 2'-O-methylguanosine-3'-phosphate
  modified_base 19: mod_base = OTHER; note = 2'-O-methyladenosine-3'-phosphate
  modified_base 20: mod_base = OTHER; note = 2'-O-methyluridine-3'-phosphate
  modified_base 21: mod_base = OTHER; note = 2'-O-methyluridine-3'-phosphate N-[tris(GalNAc-alkyl)-amidodecanoyl)]-4-hydroxyprolinol (Hyp-(GalNAc-alkyl)3)
acccaattactgtcattgatt

SEQ ID NO: 646 - RNA, 21 nt, synthetic construct
  misc_feature 1..21: note = Description of Artificial Sequence: Synthetic oligonucleotide
  source 1..21: mol_type = other RNA
  modified_base 1: mod_base = OTHER; note = 2'-O-methylcytidine-3'-phosphorothioate
  modified_base 2: mod_base = OTHER; note = 2'-O-methylcytidine-3'-phosphorothioate
  modified_base 3: mod_base = OTHER; note = 2'-O-methylcytidine-3'-phosphate
  modified_base 4: mod_base = OTHER; note = 2'-O-methyluridine-3'-phosphate
  modified_base 5: mod_base = OTHER; note = 2'-O-methylguanosine-3'-phosphate
  modified_base 6: mod_base = OTHER; note = 2'-O-methylcytidine-3'-phosphate
  modified_base 7: mod_base = OTHER; note = 2'-fluoroadenosine-3'-phosphate
  modified_base 8: mod_base = OTHER; note = 2'-O-methylcytidine-3'-phosphate
  modified_base 9: mod_base = OTHER; note = 2'-fluoroadenosine-3'-phosphate
  modified_base 10: mod_base = OTHER; note = 2'-fluoroguanosine-3'-phosphate
  modified_base 11: mod_base = OTHER; note = 2'-fluoroguanosine-3'-phosphate
  modified_base 12: mod_base = OTHER; note = 2'-O-methyladenosine-3'-phosphate
  modified_base 13: mod_base = OTHER; note = 2'-O-methyluridine-3'-phosphate
  modified_base 14: mod_base = OTHER; note = 2'-O-methyladenosine-3'-phosphate
  modified_base 15: mod_base = OTHER; note = 2'-O-methyluridine-3'-phosphate
  modified_base 16: mod_base = OTHER; note = 2'-O-methylcytidine-3'-phosphate
  modified_base 17: mod_base = OTHER; note = 2'-O-methyladenosine-3'-phosphate
  modified_base 18: mod_base = OTHER; note = 2'-O-methyladenosine-3'-phosphate
  modified_base 19: mod_base = OTHER; note = 2'-O-methyladenosine-3'-phosphate
  modified_base 20: mod_base = OTHER; note = 2'-O-methylguanosine-3'-phosphate
  modified_base 21: mod_base = OTHER; note = 2'-O-methyluridine-3'-phosphate N-[tris(GalNAc-alkyl)-amidodecanoyl)]-4-hydroxyprolinol (Hyp-(GalNAc-alkyl)3)
ccctgcacaggatatcaaagt

SEQ ID NO: 647 - RNA, 21 nt, synthetic construct
  misc_feature 1..21: note = Description of Artificial Sequence: Synthetic oligonucleotide
  source 1..21: mol_type = other RNA
  modified_base 1: mod_base = OTHER; note = 2'-O-methylcytidine-3'-phosphorothioate
  modified_base 2: mod_base = OTHER; note = 2'-O-methylcytidine-3'-phosphorothioate
  modified_base 3: mod_base = OTHER; note = 2'-O-methyladenosine-3'-phosphate
  modified_base 4: mod_base = OTHER; note = 2'-O-methyladenosine-3'-phosphate
  modified_base 5: mod_base = OTHER; note = 2'-O-methyluridine-3'-phosphate
  modified_base 6: mod_base = OTHER; note = 2'-O-methyluridine-3'-phosphate
  modified_base 7: mod_base = OTHER; note = 2'-fluoroadenosine-3'-phosphate
  modified_base 8: mod_base = OTHER; note = 2'-O-methylcytidine-3'-phosphate
  modified_base 9: mod_base = OTHER; note = 2'-fluorouridine-3'-phosphate
  modified_base 10: mod_base = OTHER; note = 2'-fluoroguanosine-3'-phosphate
  modified_base 11: mod_base = OTHER; note = 2'-fluorouridine-3'-phosphate
  modified_base 12: mod_base = OTHER; note = 2'-O-methylcytidine-3'-phosphate
  modified_base 13: mod_base = OTHER; note = 2'-O-methyladenosine-3'-phosphate
  modified_base 14: mod_base = OTHER; note = 2'-O-methyluridine-3'-phosphate
  modified_base 15: mod_base = OTHER; note = 2'-O-methyluridine-3'-phosphate
  modified_base 16: mod_base = OTHER; note = 2'-O-methylguanosine-3'-phosphate
  modified_base 17: mod_base = OTHER; note = 2'-O-methyladenosine-3'-phosphate
  modified_base 18: mod_base = OTHER; note = 2'-O-methyluridine-3'-phosphate
  modified_base 19: mod_base = OTHER; note = 2'-O-methylguanosine-3'-phosphate
  modified_base 20: mod_base = OTHER; note = 2'-O-methyladenosine-3'-phosphate
  modified_base 21: mod_base = OTHER; note = 2'-O-methyluridine-3'-phosphate N-[tris(GalNAc-alkyl)-amidodecanoyl)]-4-hydroxyprolinol (Hyp-(GalNAc-alkyl)3)
ccaattactgtcattgatgat

SEQ ID NO: 648 - RNA, 21 nt, synthetic construct
  misc_feature 1..21: note = Description of Artificial Sequence: Synthetic oligonucleotide
  source 1..21: mol_type = other RNA
  modified_base 1: mod_base = OTHER; note = 2'-O-methylcytidine-3'-phosphorothioate
  modified_base 2: mod_base = OTHER; note = 2'-O-methylguanosine-3'-phosphorothioate
  modified_base 3: mod_base = OTHER; note = 2'-O-methyluridine-3'-phosphate
  modified_base 4: mod_base = OTHER; note = 2'-O-methylguanosine-3'-phosphate
  modified_base 5: mod_base = OTHER; note = 2'-O-methylguanosine-3'-phosphate
  modified_base 6: mod_base = OTHER; note = 2'-O-methylguanosine-3'-phosphate
  modified_base 7: mod_base = OTHER; note = 2'-fluoroadenosine-3'-phosphate
  modified_base 8: mod_base = OTHER; note = 2'-O-methyluridine-3'-phosphate
  modified_base 9: mod_base = OTHER; note = 2'-fluorouridine-3'-phosphate
  modified_base 10: mod_base = OTHER; note = 2'-fluoroguanosine-3'-phosphate
  modified_base 11: mod_base = OTHER; note = 2'-fluoroadenosine-3'-phosphate
  modified_base 12: mod_base = OTHER; note = 2'-O-methyladenosine-3'-phosphate
  modified_base 13: mod_base = OTHER; note = 2'-O-methyluridine-3'-phosphate
  modified_base 14: mod_base = OTHER; note = 2'-O-methyluridine-3'-phosphate
  modified_base 15: mod_base = OTHER; note = 2'-O-methyladenosine-3'-phosphate
  modified_base 16: mod_base = OTHER; note = 2'-O-methyladenosine-3'-phosphate
  modified_base 17: mod_base = OTHER; note = 2'-O-methyladenosine-3'-phosphate
  modified_base 18: mod_base = OTHER; note = 2'-O-methyladenosine-3'-phosphate
  modified_base 19: mod_base = OTHER; note = 2'-O-methylcytidine-3'-phosphate
  modified_base 20: mod_base = OTHER; note = 2'-O-methyladenosine-3'-phosphate
  modified_base 21: mod_base = OTHER; note = 2'-O-methyluridine-3'-phosphate N-[tris(GalNAc-alkyl)-amidodecanoyl)]-4-hydroxyprolinol (Hyp-(GalNAc-alkyl)3)
cgtgggattgaattaaaacat

SEQ ID NO: 649 - RNA, 21 nt, synthetic construct
  misc_feature 1..21: note = Description of Artificial Sequence: Synthetic oligonucleotide
  source 1..21: mol_type = other RNA
  modified_base 1: mod_base = OTHER; note = 2'-O-methyladenosine-3'-phosphorothioate
  modified_base 2: mod_base = OTHER; note = 2'-O-methylguanosine-3'-phosphorothioate
  modified_base 3: mod_base = OTHER; note = 2'-O-methylguanosine-3'-phosphate
  modified_base 4: mod_base = OTHER; note = 2'-O-methyladenosine-3'-phosphate
  modified_base 5: mod_base = OTHER; note = 2'-O-methyladenosine-3'-phosphate
  modified_base 6: mod_base = OTHER; note = 2'-O-methyluridine-3'-phosphate
  modified_base 7: mod_base = OTHER; note = 2'-fluorouridine-3'-phosphate
  modified_base 8: mod_base = OTHER; note = 2'-O-methylcytidine-3'-phosphate
  modified_base 9: mod_base = OTHER; note = 2'-fluorocytidine-3'-phosphate
  modified_base 10: mod_base = OTHER; note = 2'-fluorouridine-3'-phosphate
  modified_base 11: mod_base = OTHER; note = 2'-fluoroguanosine-3'-phosphate
  modified_base 12: mod_base = OTHER; note = 2'-O-methyladenosine-3'-phosphate
  modified_base 13: mod_base = OTHER; note = 2'-O-methyladenosine-3'-phosphate
  modified_base 14: mod_base = OTHER; note = 2'-O-methyluridine-3'-phosphate
  modified_base 15: mod_base = OTHER; note = 2'-O-methyluridine-3'-phosphate
  modified_base 16: mod_base = OTHER; note = 2'-O-methyluridine-3'-phosphate
  modified_base 17: mod_base = OTHER; note = 2'-O-methyluridine-3'-phosphate
  modified_base 18: mod_base = OTHER; note = 2'-O-methyladenosine-3'-phosphate
  modified_base 19: mod_base = OTHER; note = 2'-O-methyluridine-3'-phosphate
  modified_base 20: mod_base = OTHER; note = 2'-O-methylguanosine-3'-phosphate
  modified_base 21: mod_base = OTHER; note = 2'-O-methyluridine-3'-phosphate N-[tris(GalNAc-alkyl)-amidodecanoyl)]-4-hydroxyprolinol (Hyp-(GalNAc-alkyl)3)
aggaattcctgaattttatgt

SEQ ID NO: 650 - RNA, 21 nt, synthetic construct
  misc_feature 1..21: note = Description of Artificial Sequence: Synthetic oligonucleotide
  source 1..21: mol_type = other RNA
  modified_base 1: mod_base = OTHER; note = 2'-O-methyladenosine-3'-phosphorothioate
  modified_base 2: mod_base = OTHER; note = 2'-O-methyladenosine-3'-phosphorothioate
  modified_base 3: mod_base = OTHER; note = 2'-O-methyluridine-3'-phosphate
  modified_base 4: mod_base = OTHER; note = 2'-O-methyluridine-3'-phosphate
  modified_base 5: mod_base = OTHER; note = 2'-O-methylcytidine-3'-phosphate
  modified_base 6: mod_base = OTHER; note = 2'-O-methylcytidine-3'-phosphate
  modified_base 7: mod_base = OTHER; note = 2'-fluorouridine-3'-phosphate
  modified_base 8: mod_base = OTHER; note = 2'-O-methylguanosine-3'-phosphate
  modified_base 9: mod_base = OTHER; note = 2'-fluoroadenosine-3'-phosphate
  modified_base 10: mod_base = OTHER; note = 2'-fluoroadenosine-3'-phosphate
  modified_base 11: mod_base = OTHER; note = 2'-fluorouridine-3'-phosphate
  modified_base 12: mod_base = OTHER; note = 2'-O-methyluridine-3'-phosphate
  modified_base 13: mod_base = OTHER; note = 2'-O-methyluridine-3'-phosphate
  modified_base 14: mod_base = OTHER; note = 2'-O-methyluridine-3'-phosphate
  modified_base 15: mod_base = OTHER; note = 2'-O-methyladenosine-3'-phosphate
  modified_base 16: mod_base = OTHER; note = 2'-O-methyluridine-3'-phosphate
  modified_base 17: mod_base = OTHER; note = 2'-O-methylguanosine-3'-phosphate
  modified_base 18: mod_base = OTHER; note = 2'-O-methyladenosine-3'-phosphate
  modified_base 19: mod_base = OTHER; note = 2'-O-methylcytidine-3'-phosphate
  modified_base 20: mod_base = OTHER; note = 2'-O-methyluridine-3'-phosphate
  modified_base 21: mod_base = OTHER; note = 2'-O-methyluridine-3'-phosphate N-[tris(GalNAc-alkyl)-amidodecanoyl)]-4-hydroxyprolinol (Hyp-(GalNAc-alkyl)3)
aattcctgaattttatgactt

SEQ ID NO: 651 - RNA, 21 nt, synthetic construct
  misc_feature 1..21: note = Description of Artificial Sequence: Synthetic oligonucleotide
  source 1..21: mol_type = other RNA
  modified_base 1: mod_base = OTHER; note = 2'-O-methylguanosine-3'-phosphorothioate
  modified_base 2: mod_base = OTHER; note = 2'-O-methyluridine-3'-phosphorothioate
  modified_base 3: mod_base = OTHER; note = 2'-O-methylcytidine-3'-phosphate
  modified_base 4: mod_base = OTHER; note = 2'-O-methyluridine-3'-phosphate
  modified_base 5: mod_base = OTHER; note = 2'-O-methyladenosine-3'-phosphate
  modified_base 6: mod_base = OTHER; note = 2'-O-methylguanosine-3'-phosphate
  modified_base 7: mod_base = OTHER; note = 2'-fluorouridine-3'-phosphate
  modified_base 8: mod_base = OTHER; note = 2'-O-methylcytidine-3'-phosphate
  modified_base 9: mod_base = OTHER; note = 2'-fluoroadenosine-3'-phosphate
  modified_base 10: mod_base = OTHER; note = 2'-fluoroadenosine-3'-phosphate
  modified_base 11: mod_base = OTHER; note = 2'-fluorocytidine-3'-phosphate
  modified_base 12: mod_base = OTHER; note = 2'-O-methyluridine-3'-phosphate
  modified_base 13: mod_base = OTHER; note = 2'-O-methyluridine-3'-phosphate
  modified_base 14: mod_base = OTHER; note = 2'-O-methyladenosine-3'-phosphate
  modified_base 15: mod_base = OTHER; note = 2'-O-methyladenosine-3'-phosphate
  modified_base 16: mod_base = OTHER; note = 2'-O-methyluridine-3'-phosphate
  modified_base 17: mod_base = OTHER; note = 2'-O-methyluridine-3'-phosphate
  modified_base 18: mod_base = OTHER; note = 2'-O-methylguanosine-3'-phosphate
  modified_base 19: mod_base = OTHER; note = 2'-O-methyladenosine-3'-phosphate
  modified_base 20: mod_base = OTHER; note = 2'-O-methylguanosine-3'-phosphate
  modified_base 21: mod_base = OTHER; note = 2'-O-methyluridine-3'-phosphate N-[tris(GalNAc-alkyl)-amidodecanoyl)]-4-hydroxyprolinol (Hyp-(GalNAc-alkyl)3)
gtctagtcaacttaattgagt

SEQ ID NO: 652 - RNA, 21 nt, synthetic construct
  misc_feature 1..21: note = Description of Artificial Sequence: Synthetic oligonucleotide
  source 1..21: mol_type = other RNA
  modified_base 1: mod_base = OTHER; note = 2'-O-methylguanosine-3'-phosphorothioate
  modified_base 2: mod_base = OTHER; note = 2'-O-methylguanosine-3'-phosphorothioate
  modified_base 3: mod_base = OTHER; note = 2'-O-methyladenosine-3'-phosphate
  modified_base 4: mod_base = OTHER; note = 2'-O-methyladenosine-3'-phosphate
  modified_base 5: mod_base = OTHER; note = 2'-O-methyluridine-3'-phosphate
  modified_base 6: mod_base = OTHER; note = 2'-O-methyluridine-3'-phosphate
  modified_base 7: mod_base = OTHER; note = 2'-fluorocytidine-3'-phosphate
  modified_base 8: mod_base = OTHER; note = 2'-O-methylcytidine-3'-phosphate
  modified_base 9: mod_base = OTHER; note = 2'-fluorouridine-3'-phosphate
  modified_base 10: mod_base = OTHER; note = 2'-fluoroguanosine-3'-phosphate
  modified_base 11: mod_base = OTHER; note = 2'-fluoroadenosine-3'-phosphate
  modified_base 12: mod_base = OTHER; note = 2'-O-methyladenosine-3'-phosphate
  modified_base 13: mod_base = OTHER; note = 2'-O-methyluridine-3'-phosphate
  modified_base 14: mod_base = OTHER; note = 2'-O-methyluridine-3'-phosphate
  modified_base 15: mod_base = OTHER; note = 2'-O-methyluridine-3'-phosphate
  modified_base 16: mod_base = OTHER; note = 2'-O-methyluridine-3'-phosphate
  modified_base 17: mod_base = OTHER; note = 2'-O-methyladenosine-3'-phosphate
  modified_base 18: mod_base = OTHER; note = 2'-O-methyluridine-3'-phosphate
  modified_base 19: mod_base = OTHER; note = 2'-O-methylguanosine-3'-phosphate
  modified_base 20: mod_base = OTHER; note = 2'-O-methyladenosine-3'-phosphate
  modified_base 21: mod_base = OTHER; note = 2'-O-methyluridine-3'-phosphate N-[tris(GalNAc-alkyl)-amidodecanoyl)]-4-hydroxyprolinol (Hyp-(GalNAc-alkyl)3)
ggaattcctgaattttatgat

SEQ ID NO: 653 - RNA, 21 nt, synthetic construct
  misc_feature 1..21: note = Description of Artificial Sequence: Synthetic oligonucleotide
  source 1..21: mol_type = other RNA
  modified_base 1: mod_base = OTHER; note = 2'-O-methyluridine-3'-phosphorothioate
  modified_base 2: mod_base = OTHER; note = 2'-O-methylguanosine-3'-phosphorothioate
  modified_base 3: mod_base = OTHER; note = 2'-O-methylguanosine-3'-phosphate
  modified_base 4: mod_base = OTHER; note = 2'-O-methyluridine-3'-phosphate
  modified_base 5: mod_base = OTHER; note = 2'-O-methylguanosine-3'-phosphate
  modified_base 6: mod_base = OTHER; note = 2'-O-methyluridine-3'-phosphate
  modified_base 7: mod_base = OTHER; note = 2'-fluoroguanosine-3'-phosphate
  modified_base 8: mod_base = OTHER; note = 2'-O-methyladenosine-3'-phosphate
  modified_base 9: mod_base = OTHER; note = 2'-fluoroadenosine-3'-phosphate
  modified_base 10: mod_base = OTHER; note = 2'-fluoroguanosine-3'-phosphate
  modified_base 11: mod_base = OTHER; note = 2'-fluorocytidine-3'-phosphate
  modified_base 12: mod_base = OTHER; note = 2'-O-methylcytidine-3'-phosphate
  modified_base 13: mod_base = OTHER; note = 2'-O-methyladenosine-3'-phosphate
  modified_base 14: mod_base = OTHER; note = 2'-O-methyladenosine-3'-phosphate
  modified_base 15: mod_base = OTHER; note = 2'-O-methylguanosine-3'-phosphate
  modified_base 16: mod_base = OTHER; note = 2'-O-methyladenosine-3'-phosphate
  modified_base 17: mod_base = OTHER; note = 2'-O-methyluridine-3'-phosphate
  modified_base 18: mod_base = OTHER; note = 2'-O-methyladenosine-3'-phosphate
  modified_base 19: mod_base = OTHER; note = 2'-O-methyluridine-3'-phosphate
  modified_base 20: mod_base = OTHER; note = 2'-O-methylguanosine-3'-phosphate
  modified_base 21: mod_base = OTHER; note = 2'-O-methyluridine-3'-phosphate N-[tris(GalNAc-alkyl)-amidodecanoyl)]-4-hydroxyprolinol (Hyp-(GalNAc-alkyl)3)
tggtgtgaagccaagatatgt

SEQ ID NO: 654 - RNA, 21 nt, synthetic construct
  misc_feature 1..21: note = Description of Artificial Sequence: Synthetic oligonucleotide
  source 1..21: mol_type = other RNA
  modified_base 1: mod_base = OTHER; note = 2'-O-methylcytidine-3'-phosphorothioate
  modified_base 2: mod_base = OTHER; note = 2'-O-methyluridine-3'-phosphorothioate
  modified_base 3: mod_base = OTHER; note = 2'-O-methylcytidine-3'-phosphate
  modified_base 4: mod_base = OTHER; note = 2'-O-methylcytidine-3'-phosphate
  modified_base 5: mod_base = OTHER; note = 2'-O-methylcytidine-3'-phosphate
  modified_base 6: mod_base = OTHER; note = 2'-O-methyluridine-3'-phosphate
  modified_base 7: mod_base = OTHER; note = 2'-fluoroguanosine-3'-phosphate
  modified_base 8: mod_base = OTHER; note = 2'-O-methylcytidine-3'-phosphate
  modified_base 9: mod_base = OTHER; note = 2'-fluoroadenosine-3'-phosphate
  modified_base 10: mod_base = OTHER; note = 2'-fluorocytidine-3'-phosphate
  modified_base 11: mod_base = OTHER; note = 2'-fluoroadenosine-3'-phosphate
  modified_base 12: mod_base = OTHER; note = 2'-O-methylguanosine-3'-phosphate
  modified_base 13: mod_base = OTHER; note = 2'-O-methylguanosine-3'-phosphate
  modified_base 14: mod_base = OTHER; note = 2'-O-methyladenosine-3'-phosphate
  modified_base 15: mod_base = OTHER; note = 2'-O-methyluridine-3'-phosphate
  modified_base 16: mod_base = OTHER; note = 2'-O-methyladenosine-3'-phosphate
  modified_base 17: mod_base = OTHER; note = 2'-O-methyluridine-3'-phosphate
  modified_base 18: mod_base = OTHER; note = 2'-O-methylcytidine-3'-phosphate
  modified_base 19: mod_base = OTHER; note = 2'-O-methyladenosine-3'-phosphate
  modified_base 20: mod_base = OTHER; note = 2'-O-methyladenosine-3'-phosphate
  modified_base 21: mod_base = OTHER; note = 2'-O-methyluridine-3'-phosphate N-[tris(GalNAc-alkyl)-amidodecanoyl)]-4-hydroxyprolinol (Hyp-(GalNAc-alkyl)3)
ctccctgcacaggatatcaat

SEQ ID NO: 655 - RNA, 21 nt, synthetic construct
  misc_feature 1..21: note = Description of Artificial Sequence: Synthetic oligonucleotide
  source 1..21: mol_type = other RNA
  modified_base 1: mod_base = OTHER; note = 2'-O-methyladenosine-3'-phosphorothioate
  modified_base 2: mod_base = OTHER; note = 2'-O-methyluridine-3'-phosphorothioate
  modified_base 3: mod_base = OTHER; note = 2'-O-methylguanosine-3'-phosphate
  modified_base 4: mod_base = OTHER; note = 2'-O-methylguanosine-3'-phosphate
  modified_base 5: mod_base = OTHER; note = 2'-O-methyluridine-3'-phosphate
  modified_base 6: mod_base = OTHER; note = 2'-O-methylguanosine-3'-phosphate
  modified_base 7: mod_base = OTHER; note = 2'-fluorouridine-3'-phosphate
  modified_base 8: mod_base = OTHER; note = 2'-O-methylguanosine-3'-phosphate
  modified_base 9: mod_base = OTHER; note = 2'-fluoroadenosine-3'-phosphate
  modified_base 10: mod_base = OTHER; note = 2'-fluoroadenosine-3'-phosphate
  modified_base 11: mod_base = OTHER; note = 2'-fluoroguanosine-3'-phosphate
  modified_base 12: mod_base = OTHER; note = 2'-O-methylcytidine-3'-phosphate
  modified_base 13: mod_base = OTHER; note = 2'-O-methylcytidine-3'-phosphate
  modified_base 14: mod_base = OTHER; note = 2'-O-methyladenosine-3'-phosphate
  modified_base 15: mod_base = OTHER; note = 2'-O-methyladenosine-3'-phosphate
  modified_base 16: mod_base = OTHER; note = 2'-O-methylguanosine-3'-phosphate
  modified_base 17: mod_base = OTHER; note = 2'-O-methyladenosine-3'-phosphate
  modified_base 18: mod_base = OTHER; note = 2'-O-methyluridine-3'-phosphate
  modified_base 19: mod_base = OTHER; note = 2'-O-methyladenosine-3'-phosphate
  modified_base 20: mod_base = OTHER; note = 2'-O-methyluridine-3'-phosphate
  modified_base 21: mod_base = OTHER; note = 2'-O-methyluridine-3'-phosphate N-[tris(GalNAc-alkyl)-amidodecanoyl)]-4-hydroxyprolinol (Hyp-(GalNAc-alkyl)3)
atggtgtgaagccaagatatt

SEQ ID NO: 656 - RNA, 21 nt, synthetic construct
  misc_feature 1..21: note = Description of Artificial Sequence: Synthetic oligonucleotide
  source 1..21: mol_type = other RNA
  modified_base 1: mod_base = OTHER; note = 2'-O-methyluridine-3'-phosphorothioate
  modified_base 2: mod_base = OTHER; note = 2'-O-methylcytidine-3'-phosphorothioate
  modified_base 3: mod_base = OTHER; note = 2'-O-methylcytidine-3'-phosphate
  modified_base 4: mod_base = OTHER; note = 2'-O-methylcytidine-3'-phosphate
  modified_base 5: mod_base = OTHER; note = 2'-O-methyluridine-3'-phosphate
  modified_base 6: mod_base = OTHER; note = 2'-O-methylguanosine-3'-phosphate
  modified_base 7: mod_base = OTHER; note = 2'-fluorocytidine-3'-phosphate
  modified_base 8: mod_base = OTHER; note = 2'-O-methyladenosine-3'-phosphate
  modified_base 9: mod_base = OTHER; note = 2'-fluorocytidine-3'-phosphate
  modified_base 10: mod_base = OTHER; note = 2'-fluoroadenosine-3'-phosphate
  modified_base 11: mod_base = OTHER; note = 2'-fluoroguanosine-3'-phosphate
  modified_base 12: mod_base = OTHER; note = 2'-O-methylguanosine-3'-phosphate
  modified_base 13: mod_base = OTHER; note = 2'-O-methyladenosine-3'-phosphate
  modified_base 14: mod_base = OTHER; note = 2'-O-methyluridine-3'-phosphate
  modified_base 15: mod_base = OTHER; note = 2'-O-methyladenosine-3'-phosphate
  modified_base 16: mod_base = OTHER; note = 2'-O-methyluridine-3'-phosphate
  modified_base 17: mod_base = OTHER; note = 2'-O-methylcytidine-3'-phosphate
  modified_base 18: mod_base = OTHER; note = 2'-O-methyladenosine-3'-phosphate
  modified_base 19: mod_base = OTHER; note = 2'-O-methyladenosine-3'-phosphate
  modified_base 20: mod_base = OTHER; note = 2'-O-methyladenosine-3'-phosphate
  modified_base 21: mod_base = OTHER; note = 2'-O-methyluridine-3'-phosphate N-[tris(GalNAc-alkyl)-amidodecanoyl)]-4-hydroxyprolinol (Hyp-(GalNAc-alkyl)3)
tccctgcacaggatatcaaat

SEQ ID NO: 657 - RNA, 21 nt, synthetic construct
  misc_feature 1..21: note = Description of Artificial Sequence: Synthetic oligonucleotide
  source 1..21: mol_type = other RNA
  modified_base 1: mod_base = OTHER; note = 2'-O-methyladenosine-3'-phosphorothioate
  modified_base 2: mod_base = OTHER; note = 2'-O-methyladenosine-3'-phosphorothioate
  modified_base 3: mod_base = OTHER; note = 2'-O-methyluridine-3'-phosphate
  modified_base 4: mod_base = OTHER; note = 2'-O-methylguanosine-3'-phosphate
  modified_base 5: mod_base = OTHER; note = 2'-O-methyladenosine-3'-phosphate
  modified_base 6: mod_base = OTHER; note = 2'-O-methyladenosine-3'-phosphate
  modified_base 7: mod_base = OTHER; note = 2'-fluoroadenosine-3'-phosphate
  modified_base 8: mod_base = OTHER; note = 2'-O-methyluridine-3'-phosphate
  modified_base 9: mod_base = OTHER; note = 2'-fluorocytidine-3'-phosphate
  modified_base 10: mod_base = OTHER; note = 2'-fluoroadenosine-3'-phosphate
  modified_base 11: mod_base = OTHER; note = 2'-fluoroadenosine-3'-phosphate
  modified_base 12: mod_base = OTHER; note = 2'-O-methyluridine-3'-phosphate
  modified_base 13: mod_base = OTHER; note = 2'-O-methyluridine-3'-phosphate
  modified_base 14: mod_base = OTHER; note = 2'-O-methyladenosine-3'-phosphate
  modified_base 15: mod_base = OTHER; note = 2'-O-methyluridine-3'-phosphate
  modified_base 16: mod_base = OTHER; note = 2'-O-methylguanosine-3'-phosphate
  modified_base 17: mod_base = OTHER; note = 2'-O-methyladenosine-3'-phosphate
  modified_base 18: mod_base = OTHER; note = 2'-O-methyladenosine-3'-phosphate
  modified_base 19: mod_base = OTHER; note = 2'-O-methylguanosine-3'-phosphate
  modified_base 20: mod_base = OTHER; note = 2'-O-methyladenosine-3'-phosphate
  modified_base 21: mod_base = OTHER; note = 2'-O-methyluridine-3'-phosphate N-[tris(GalNAc-alkyl)-amidodecanoyl)]-4-hydroxyprolinol (Hyp-(GalNAc-alkyl)3)
aatgaaatcaattatgaagat

SEQ ID NO: 658 - RNA, 21 nt, synthetic construct
  misc_feature 1..21: note = Description of Artificial Sequence: Synthetic oligonucleotide
  source 1..21: mol_type = other RNA
  modified_base 1: mod_base = OTHER; note = 2'-O-methyladenosine-3'-phosphorothioate
  modified_base 2: mod_base = OTHER; note = 2'-O-methyluridine-3'-phosphorothioate
  modified_base 3: mod_base = OTHER; note = 2'-O-methylcytidine-3'-phosphate
  modified_base 4: mod_base = OTHER; note = 2'-O-methyluridine-3'-phosphate
  modified_base 5: mod_base = OTHER; note = 2'-O-methylguanosine-3'-phosphate
  modified_base 6: mod_base = OTHER; note = 2'-O-methylguanosine-3'-phosphate
  modified_base 7: mod_base = OTHER; note = 2'-fluoroadenosine-3'-phosphate
  modified_base 8: mod_base = OTHER; note = 2'-O-methyluridine-3'-phosphate
  modified_base 9: mod_base = OTHER; note = 2'-fluoroguanosine-3'-phosphate
  modified_base 10: mod_base = OTHER; note = 2'-fluorouridine-3'-phosphate
  modified_base 11: mod_base = OTHER; note = 2'-fluorocytidine-3'-phosphate
  modified_base 12: mod_base = OTHER; note = 2'-O-methyluridine-3'-phosphate
  modified_base 13: mod_base = OTHER; note = 2'-O-methyladenosine-3'-phosphate
  modified_base 14: mod_base = OTHER; note = 2'-O-methyluridine-3'-phosphate
  modified_base 15: mod_base = OTHER; note = 2'-O-methylguanosine-3'-phosphate
  modified_base 16: mod_base = OTHER; note = 2'-O-methyluridine-3'-phosphate
  modified_base 17: mod_base = OTHER; note = 2'-O-methylguanosine-3'-phosphate
  modified_base 18: mod_base = OTHER; note = 2'-O-methyluridine-3'-phosphate
  modified_base 19: mod_base = OTHER; note = 2'-O-methyluridine-3'-phosphate
  modified_base 20: mod_base = OTHER; note = 2'-O-methyluridine-3'-phosphate
  modified_base 21: mod_base = OTHER; note = 2'-O-methyluridine-3'-phosphate N-[tris(GalNAc-alkyl)-amidodecanoyl)]-4-hydroxyprolinol (Hyp-(GalNAc-alkyl)3)
atctggatgtctatgtgtttt

SEQ ID NO: 659 - RNA, 21 nt, synthetic construct
  misc_feature 1..21: note = Description of Artificial Sequence: Synthetic oligonucleotide
  source 1..21: mol_type = other RNA
  modified_base 1: mod_base = OTHER; note = 2'-O-methyluridine-3'-phosphorothioate
  modified_base 2: mod_base = OTHER; note = 2'-O-methylguanosine-3'-phosphorothioate
  modified_base 3: mod_base = OTHER; note = 2'-O-methyladenosine-3'-phosphate
  modified_base 4: mod_base = OTHER; note = 2'-O-methyladenosine-3'-phosphate
  modified_base 5: mod_base = OTHER; note = 2'-O-methylcytidine-3'-phosphate
  modified_base 6: mod_base = OTHER; note = 2'-O-methylcytidine-3'-phosphate
  modified_base 7: mod_base = OTHER; note = 2'-fluoroadenosine-3'-phosphate
  modified_base 8: mod_base = OTHER; note = 2'-O-methyladenosine-3'-phosphate
  modified_base 9: mod_base = OTHER; note = 2'-fluoroguanosine-3'-phosphate
  modified_base 10: mod_base = OTHER; note = 2'-fluorouridine-3'-phosphate
  modified_base 11: mod_base = OTHER; note = 2'-fluoroguanosine-3'-phosphate
  modified_base 12: mod_base = OTHER; note = 2'-O-methyladenosine-3'-phosphate
  modified_base 13: mod_base = OTHER; note = 2'-O-methyladenosine-3'-phosphate
  modified_base 14: mod_base = OTHER; note = 2'-O-methylcytidine-3'-phosphate
  modified_base 15: mod_base = OTHER; note = 2'-O-methyladenosine-3'-phosphate
  modified_base 16: mod_base = OTHER; note = 2'-O-methyluridine-3'-phosphate
  modified_base 17: mod_base = OTHER; note = 2'-O-methylcytidine-3'-phosphate
  modified_base 18: mod_base = OTHER; note = 2'-O-methyladenosine-3'-phosphate
  modified_base 19: mod_base = OTHER; note = 2'-O-methyladenosine-3'-phosphate
  modified_base 20: mod_base = OTHER; note = 2'-O-methyluridine-3'-phosphate
  modified_base 21: mod_base = OTHER; note = 2'-O-methyluridine-3'-phosphate N-[tris(GalNAc-alkyl)-amidodecanoyl)]-4-hydroxyprolinol (Hyp-(GalNAc-alkyl)3)
tgaaccaagtgaacatcaatt

SEQ ID NO: 660 - RNA, 21 nt, synthetic construct
  misc_feature 1..21: note = Description of Artificial Sequence: Synthetic oligonucleotide
  source 1..21: mol_type = other RNA
  modified_base 1: mod_base = OTHER; note = 2'-O-methylcytidine-3'-phosphorothioate
  modified_base 2: mod_base = OTHER; note = 2'-O-methyladenosine-3'-phosphorothioate
  modified_base 3: mod_base = OTHER; note = 2'-O-methylguanosine-3'-phosphate
  modified_base 4: mod_base = OTHER; note = 2'-O-methylguanosine-3'-phosphate
  modified_base 5: mod_base = OTHER; note = 2'-O-methyladenosine-3'-phosphate
  modified_base 6: mod_base = OTHER; note = 2'-O-methyladenosine-3'-phosphate
  modified_base 7: mod_base = OTHER; note = 2'-fluorouridine-3'-phosphate
  modified_base 8: mod_base = OTHER; note = 2'-O-methyluridine-3'-phosphate
  modified_base 9: mod_base = OTHER; note = 2'-fluorocytidine-3'-phosphate
  modified_base 10: mod_base = OTHER; note = 2'-fluorocytidine-3'-phosphate
  modified_base 11: mod_base = OTHER; note = 2'-fluorouridine-3'-phosphate
  modified_base 12: mod_base = OTHER; note = 2'-O-methylguanosine-3'-phosphate
  modified_base 13: mod_base = OTHER; note = 2'-O-methyladenosine-3'-phosphate
  modified_base 14: mod_base = OTHER; note = 2'-O-methyladenosine-3'-phosphate
  modified_base 15: mod_base = OTHER; note = 2'-O-methyluridine-3'-phosphate
  modified_base 16: mod_base = OTHER; note = 2'-O-methyluridine-3'-phosphate
  modified_base 17: mod_base = OTHER; note = 2'-O-methyluridine-3'-phosphate
  modified_base 18: mod_base = OTHER; note = 2'-O-methyluridine-3'-phosphate
  modified_base 19: mod_base = OTHER; note = 2'-O-methyladenosine-3'-phosphate
  modified_base 20: mod_base = OTHER; note = 2'-O-methyluridine-3'-phosphate
  modified_base 21: mod_base = OTHER; note = 2'-O-methyluridine-3'-phosphate N-[tris(GalNAc-alkyl)-amidodecanoyl)]-4-hydroxyprolinol (Hyp-(GalNAc-alkyl)3)
caggaattcctgaattttatt

SEQ ID NO: 661 - RNA, 21 nt, synthetic construct
  misc_feature 1..21: note = Description of Artificial Sequence: Synthetic oligonucleotide
  source 1..21: mol_type = other RNA
  modified_base 1: mod_base = OTHER; note = 2'-O-methylguanosine-3'-phosphorothioate
  modified_base 2: mod_base = OTHER; note = 2'-O-methyluridine-3'-phosphorothioate
  modified_base 3: mod_base = OTHER; note = 2'-O-methylguanosine-3'-phosphate
  modified_base 4: mod_base = OTHER; note = 2'-O-methyladenosine-3'-phosphate
  modified_base 5: mod_base = OTHER; note = 2'-O-methyladenosine-3'-phosphate
  modified_base 6: mod_base = OTHER; note = 2'-O-methylcytidine-3'-phosphate
  modified_base 7: mod_base = OTHER; note = 2'-fluorocytidine-3'-phosphate
  modified_base 8: mod_base = OTHER; note = 2'-O-methyladenosine-3'-phosphate
  modified_base 9: mod_base = OTHER; note = 2'-fluoroadenosine-3'-phosphate
  modified_base 10: mod_base = OTHER; note = 2'-fluoroguanosine-3'-phosphate
  modified_base 11: mod_base = OTHER; note = 2'-fluorouridine-3'-phosphate
  modified_base 12: mod_base = OTHER; note = 2'-O-methylguanosine-3'-phosphate
  modified_base 13: mod_base = OTHER; note = 2'-O-methyladenosine-3'-phosphate
  modified_base 14: mod_base = OTHER; note = 2'-O-methyladenosine-3'-phosphate
  modified_base 15: mod_base = OTHER; note = 2'-O-methylcytidine-3'-phosphate
  modified_base 16: mod_base = OTHER; note = 2'-O-methyladenosine-3'-phosphate
  modified_base 17: mod_base = OTHER; note = 2'-O-methyluridine-3'-phosphate
  modified_base 18: mod_base = OTHER; note = 2'-O-methylcytidine-3'-phosphate
  modified_base 19: mod_base = OTHER; note = 2'-O-methyladenosine-3'-phosphate
  modified_base 20: mod_base = OTHER; note = 2'-O-methyladenosine-3'-phosphate
  modified_base 21: mod_base = OTHER; note = 2'-O-methyluridine-3'-phosphate N-[tris(GalNAc-alkyl)-amidodecanoyl)]-4-hydroxyprolinol (Hyp-(GalNAc-alkyl)3)
gtgaaccaagtgaacatcaat

SEQ ID NO: 662 - RNA, 23 nt, synthetic construct
  misc_feature 1..23: note = Description of Artificial Sequence: Synthetic oligonucleotide
  source 1..23: mol_type = other RNA
  modified_base 1: mod_base = OTHER; note = 2'-O-methyladenosine-3'-phosphorothioate
  modified_base 2: mod_base = OTHER; note = 2'-fluorouridine -3'-phosphorothioate
  modified_base 3: mod_base = OTHER; note = 2'-O-methyladenosine-3'-phosphate
  modified_base 4: mod_base = OTHER; note = 2'-O-methylcytidine-3'-phosphate
  modified_base 5: mod_base = OTHER; note = 2'-O-methyladenosine-3'-phosphate
  modified_base 6: mod_base = OTHER; note = 2'-fluorouridine-3'-phosphate
  modified_base 7: mod_base = OTHER; note = 2'-O-methylguanosine-3'-phosphate
  modified_base 8: mod_base = OTHER; note = 2'-fluoroadenosine-3'-phosphate
  modified_base 9: mod_base = OTHER; note = 2'-fluoroadenosine-3'-phosphate
  modified_base 10: mod_base = OTHER; note = 2'-O-methylguanosine-3'-phosphate
  modified_base 11: mod_base = OTHER; note = 2'-O-methylguanosine-3'-phosphate
  modified_base 12: mod_base = OTHER; note = 2'-O-methyladenosine-3'-phosphate
  modified_base 13: mod_base = OTHER; note = 2'-O-methylguanosine-3'-phosphate
  modified_base 14: mod_base = OTHER; note = 2'-fluorouridine-3'-phosphate
  modified_base 15: mod_base = OTHER; note = 2'-O-methylcytidine-3'-phosphate
  modified_base 16: mod_base = OTHER; note = 2'-fluorouridine-3'-phosphate
  modified_base 17: mod_base = OTHER; note = 2'-O-methyluridine-3'-phosphate
  modified_base 18: mod_base = OTHER; note = 2'-O-methylguanosine-3'-phosphate
  modified_base 19: mod_base = OTHER; note = 2'-O-methylguanosine-3'-phosphate
  modified_base 20: mod_base = OTHER; note = 2'-O-methylcytidine-3'-phosphate
  modified_base 21: mod_base = OTHER; note = 2'-O-methyladenosine-3'-phosphorothioate
  modified_base 22: mod_base = OTHER; note = 2'-O-methylguanosine-3'-phosphorothioate
  modified_base 23: mod_base = OTHER; note = 2'-O-methylguanosine-3'-phosphate
atacatgaaggagtcttggcagg

SEQ ID NO: 663 - RNA, 23 nt, synthetic construct
  misc_feature 1..23: note = Description of Artificial Sequence: Synthetic oligonucleotide
  source 1..23: mol_type = other RNA
  modified_base 1: mod_base = OTHER; note = 2'-O-methyladenosine-3'-phosphorothioate
  modified_base 2: mod_base = OTHER; note = 2'-fluorouridine -3'-phosphorothioate
  modified_base 3: mod_base = OTHER; note = 2'-O-methylguanosine-3'-phosphate
  modified_base 4: mod_base = OTHER; note = 2'-O-methyladenosine-3'-phosphate
  modified_base 5: mod_base = OTHER; note = 2'-O-methyladenosine-3'-phosphate
  modified_base 6: mod_base = OTHER; note = 2'-fluorouridine-3'-phosphate
  modified_base 7: mod_base = OTHER; note = 2'-O-methylguanosine-3'-phosphate
  modified_base 8: mod_base = OTHER; note = 2'-fluoroadenosine-3'-phosphate
  modified_base 9: mod_base = OTHER; note = 2'-fluoroadenosine-3'-phosphate
  modified_base 10: mod_base = OTHER; note = 2'-O-methyladenosine-3'-phosphate
  modified_base 11: mod_base = OTHER; note = 2'-O-methylcytidine-3'-phosphate
  modified_base 12: mod_base = OTHER; note = 2'-O-methylguanosine-3'-phosphate
  modified_base 13: mod_base = OTHER; note = 2'-O-methyladenosine-3'-phosphate
  modified_base 14: mod_base = OTHER; note = 2'-fluorocytidine-3'-phosphate
  modified_base 15: mod_base = OTHER; note = 2'-O-methyluridine-3'-phosphate
  modified_base 16: mod_base = OTHER; note = 2'-fluorouridine-3'-phosphate
  modified_base 17: mod_base = OTHER; note = 2'-O-methylcytidine-3'-phosphate
  modified_base 18: mod_base = OTHER; note = 2'-O-methyluridine-3'-phosphate
  modified_base 19: mod_base = OTHER; note = 2'-O-methylcytidine-3'-phosphate
  modified_base 20: mod_base = OTHER; note = 2'-O-methyluridine-3'-phosphate
  modified_base 21: mod_base = OTHER; note = 2'-O-methyluridine-3'-phosphorothioate
  modified_base 22: mod_base = OTHER; note = 2'-O-methylguanosine-3'-phosphorothioate
  modified_base 23: mod_base = OTHER; note = 2'-O-methyluridine-3'-phosphate
atgaatgaaacgacttctcttgt

SEQ ID NO: 664 - RNA, 23 nt, synthetic construct
  misc_feature 1..23: note = Description of Artificial Sequence: Synthetic oligonucleotide
  source 1..23: mol_type = other RNA
  modified_base 1: mod_base = OTHER; note = 2'-O-methyladenosine-3'-phosphorothioate
  modified_base 2: mod_base = OTHER; note = 2'-fluorouridine -3'-phosphorothioate
  modified_base 3: mod_base = OTHER; note = 2'-O-methyluridine-3'-phosphate
  modified_base 4: mod_base = OTHER; note = 2'-O-methylguanosine-3'-phosphate
  modified_base 5: mod_base = OTHER; note = 2'-O-methyladenosine-3'-phosphate
  modified_base 6: mod_base = OTHER; note = 2'-fluoroadenosine-3'-phosphate
  modified_base 7: mod_base = OTHER; note = 2'-O-methyluridine-3'-phosphate
  modified_base 8: mod_base = OTHER; note = 2'-fluoroguanosine-3'-phosphate
  modified_base 9: mod_base = OTHER; note = 2'-fluoroadenosine-3'-phosphate
  modified_base 10: mod_base = OTHER; note = 2'-O-methyladenosine-3'-phosphate
  modified_base 11: mod_base = OTHER; note = 2'-O-methyladenosine-3'-phosphate
  modified_base 12: mod_base = OTHER; note = 2'-O-methylcytidine-3'-phosphate
  modified_base 13: mod_base = OTHER; note = 2'-O-methylguanosine-3'-phosphate
  modified_base 14: mod_base = OTHER; note = 2'-fluoroadenosine-3'-phosphate
  modified_base 15: mod_base = OTHER; note = 2'-O-methylcytidine-3'-phosphate
  modified_base 16: mod_base = OTHER; note = 2'-fluorouridine-3'-phosphate
  modified_base 17: mod_base = OTHER; note = 2'-O-methyluridine-3'-phosphate
  modified_base 18: mod_base = OTHER; note = 2'-O-methylcytidine-3'-phosphate
  modified_base 19: mod_base = OTHER; note = 2'-O-methyluridine-3'-phosphate
  modified_base 20: mod_base = OTHER; note = 2'-O-methylcytidine-3'-phosphate
  modified_base 21: mod_base = OTHER; note = 2'-O-methyluridine-3'-phosphorothioate
  modified_base 22: mod_base = OTHER; note = 2'-O-methyluridine-3'-phosphorothioate
  modified_base 23: mod_base = OTHER; note = 2'-O-methylguanosine-3'-phosphate
attgaatgaaacgacttctcttg

SEQ ID NO: 665 - RNA, 23 nt, synthetic construct
  misc_feature 1..23: note = Description of Artificial Sequence: Synthetic oligonucleotide
  source 1..23: mol_type = other RNA
  modified_base 1: mod_base = OTHER; note = 2'-O-methyladenosine-3'-phosphorothioate
  modified_base 2: mod_base = OTHER; note = 2'-fluorouridine -3'-phosphorothioate
  modified_base 3: mod_base = OTHER; note = 2'-O-methyluridine-3'-phosphate
  modified_base 4: mod_base = OTHER; note = 2'-O-methylcytidine-3'-phosphate
  modified_base 5: mod_base = OTHER; note = 2'-O-methyladenosine-3'-phosphate
  modified_base 6: mod_base = OTHER; note = 2'-fluoroadenosine-3'-phosphate
  modified_base 7: mod_base = OTHER; note = 2'-O-methylcytidine-3'-phosphate
  modified_base 8: mod_base = OTHER; note = 2'-fluorouridine-3'-phosphate
  modified_base 9: mod_base = OTHER; note = 2'-fluorouridine-3'-phosphate
  modified_base 10: mod_base = OTHER; note = 2'-O-methylguanosine-3'-phosphate
  modified_base 11: mod_base = OTHER; note = 2'-O-methyluridine-3'-phosphate
  modified_base 12: mod_base = OTHER; note = 2'-O-methylguanosine-3'-phosphate
  modified_base 13: mod_base = OTHER; note = 2'-O-methylguanosine-3'-phosphate
  modified_base 14: mod_base = OTHER; note = 2'-fluorouridine-3'-phosphate
  modified_base 15: mod_base = OTHER; note = 2'-O-methylcytidine-3'-phosphate
  modified_base 16: mod_base = OTHER; note = 2'-fluorouridine-3'-phosphate
  modified_base 17: mod_base = OTHER; note = 2'-O-methyluridine-3'-phosphate
  modified_base 18: mod_base = OTHER; note = 2'-O-methylcytidine-3'-phosphate
  modified_base 19: mod_base = OTHER; note = 2'-O-methyladenosine-3'-phosphate
  modified_base 20: mod_base = OTHER; note = 2'-O-methyluridine-3'-phosphate
  modified_base 21: mod_base = OTHER; note = 2'-O-methyladenosine-3'-phosphorothioate
  modified_base 22: mod_base = OTHER; note = 2'-O-methyladenosine-3'-phosphorothioate
  modified_base 23: mod_base = OTHER; note = 2'-O-methyluridine-3'-phosphate
attcaacttgtggtcttcataat

SEQ ID NO: 666 - RNA, 23 nt, synthetic construct
  misc_feature 1..23: note = Description of Artificial Sequence: Synthetic oligonucleotide
  source 1..23: mol_type = other RNA
  modified_base 1: mod_base = OTHER; note = 2'-O-methyladenosine-3'-phosphorothioate
  modified_base 2: mod_base = OTHER; note = 2'-fluorouridine -3'-phosphorothioate
  modified_base 3: mod_base = OTHER; note = 2'-O-methyluridine-3'-phosphate
  modified_base 4: mod_base = OTHER; note = 2'-O-methylguanosine-3'-phosphate
  modified_base 5: mod_base = OTHER; note = 2'-O-methyladenosine-3'-phosphate
  modified_base 6: mod_base = OTHER; note = 2'-fluorouridine-3'-phosphate
  modified_base 7: mod_base = OTHER; note = 2'-O-methylguanosine-3'-phosphate
  modified_base 8: mod_base = OTHER; note = 2'-fluorouridine-3'-phosphate
  modified_base 9: mod_base = OTHER; note = 2'-fluoroadenosine-3'-phosphate
  modified_base 10: mod_base = OTHER; note = 2'-O-methylguanosine-3'-phosphate
  modified_base 11: mod_base = OTHER; note = 2'-O-methyladenosine-3'-phosphate
  modified_base 12: mod_base = OTHER; note = 2'-O-methylcytidine-3'-phosphate
  modified_base 13: mod_base = OTHER; note = 2'-O-methylcytidine-3'-phosphate
  modified_base 14: mod_base = OTHER; note = 2'-fluorouridine-3'-phosphate
  modified_base 15: mod_base = OTHER; note = 2'-O-methylcytidine-3'-phosphate
  modified_base 16: mod_base = OTHER; note = 2'-fluorocytidine-3'-phosphate
  modified_base 17: mod_base = OTHER; note = 2'-O-methyluridine-3'-phosphate
  modified_base 18: mod_base = OTHER; note = 2'-O-methyluridine-3'-phosphate
  modified_base 19: mod_base = OTHER; note = 2'-O-methylcytidine-3'-phosphate
  modified_base 20: mod_base = OTHER; note = 2'-O-methylcytidine-3'-phosphate
  modified_base 21: mod_base = OTHER; note = 2'-O-methylguanosine-3'-phosphorothioate
  modified_base 22: mod_base = OTHER; note = 2'-O-methyladenosine-3'-phosphorothioate
  modified_base 23: mod_base = OTHER; note = 2'-O-methylguanosine-3'-phosphate
attgatgtagacctccttccgag

SEQ ID NO: 667 - RNA, 23 nt, synthetic construct
  misc_feature 1..23: note = Description of Artificial Sequence: Synthetic oligonucleotide
  source 1..23: mol_type = other RNA
  modified_base 1: mod_base = OTHER; note = 2'-O-methyladenosine-3'-phosphorothioate
  modified_base 2: mod_base = OTHER; note = 2'-fluoroadenosine-3'-phosphorothioate
  modified_base 3: mod_base = OTHER; note = 2'-O-methylguanosine-3'-phosphate
  modified_base 4: mod_base = OTHER; note = 2'-O-methylcytidine-3'-phosphate
  modified_base 5: mod_base = OTHER; note = 2'-O-methyluridine-3'-phosphate
  modified_base 6: mod_base = OTHER; note = 2'-fluorouridine-3'-phosphate
  modified_base 7: mod_base = OTHER; note = 2'-O-methyladenosine-3'-phosphate
  modified_base 8: mod_base = OTHER; note = 2'-fluorouridine-3'-phosphate
  modified_base 9: mod_base = OTHER; note = 2'-fluorouridine-3'-phosphate
  modified_base 10: mod_base = OTHER; note = 2'-O-methylcytidine-3'-phosphate
  modified_base 11: mod_base = OTHER; note = 2'-O-methyluridine-3'-phosphate
  modified_base 12: mod_base = OTHER; note = 2'-O-methyluridine-3'-phosphate
  modified_base 13: mod_base = OTHER; note = 2'-O-methylguanosine-3'-phosphate
  modified_base 14: mod_base = OTHER; note = 2'-fluoroadenosine-3'-phosphate
  modified_base 15: mod_base = OTHER; note = 2'-O-methylguanosine-3'-phosphate
  modified_base 16: mod_base = OTHER; note = 2'-fluorocytidine-3'-phosphate
  modified_base 17: mod_base = OTHER; note = 2'-O-methyluridine-3'-phosphate
  modified_base 18: mod_base = OTHER; note = 2'-O-methyluridine-3'-phosphate
  modified_base 19: mod_base = OTHER; note = 2'-O-methylguanosine-3'-phosphate
  modified_base 20: mod_base = OTHER; note = 2'-O-methyladenosine-3'-phosphate
  modified_base 21: mod_base = OTHER; note = 2'-O-methyluridine-3'-phosphorothioate
  modified_base 22: mod_base = OTHER; note = 2'-O-methylcytidine-3'-phosphorothioate
  modified_base 23: mod_base = OTHER; note = 2'-O-methyladenosine-3'-phosphate
aagcttattcttgagcttgatca

SEQ ID NO: 668 - RNA, 23 nt, synthetic construct
  misc_feature 1..23: note = Description of Artificial Sequence: Synthetic oligonucleotide
  source 1..23: mol_type = other RNA
  modified_base 1: mod_base = OTHER; note = 2'-O-methyladenosine-3'-phosphorothioate
  modified_base 2: mod_base = OTHER; note = 2'-fluoroguanosine-3'-phosphorothioate
  modified_base 3: mod_base = OTHER; note = 2'-O-methyladenosine-3'-phosphate
  modified_base 4: mod_base = OTHER; note = 2'-O-methyladenosine-3'-phosphate
  modified_base 5: mod_base = OTHER; note = 2'-O-methyluridine-3'-phosphate
  modified_base 6: mod_base = OTHER; note = 2'-fluoroguanosine-3'-phosphate
  modified_base 7: mod_base = OTHER; note = 2'-O-methyladenosine-3'-phosphate
  modified_base 8: mod_base = OTHER; note = 2'-fluoroadenosine-3'-phosphate
  modified_base 9: mod_base = OTHER; note = 2'-fluoroadenosine-3'-phosphate
  modified_base 10: mod_base = OTHER; note = 2'-O-methylcytidine-3'-phosphate
  modified_base 11: mod_base = OTHER; note = 2'-O-methylguanosine-3'-phosphate
  modified_base 12: mod_base = OTHER; note = 2'-O-methyladenosine-3'-phosphate
  modified_base 13: mod_base = OTHER; note = 2'-O-methylcytidine-3'-phosphate
  modified_base 14: mod_base = OTHER; note = 2'-fluorouridine-3'-phosphate
  modified_base 15: mod_base = OTHER; note = 2'-O-methyluridine-3'-phosphate
  modified_base 16: mod_base = OTHER; note = 2'-fluorocytidine-3'-phosphate
  modified_base 17: mod_base = OTHER; note = 2'-O-methyluridine-3'-phosphate
  modified_base 18: mod_base = OTHER; note = 2'-O-methylcytidine-3'-phosphate
  modified_base 19: mod_base = OTHER; note = 2'-O-methyluridine-3'-phosphate
  modified_base 20: mod_base = OTHER; note = 2'-O-methyluridine-3'-phosphate
  modified_base 21: mod_base = OTHER; note = 2'-O-methylguanosine-3'-phosphorothioate
  modified_base 22: mod_base = OTHER; note = 2'-O-methyluridine-3'-phosphorothioate
  modified_base 23: mod_base = OTHER; note = 2'-O-methylguanosine-3'-phosphate
agaatgaaacgacttctcttgtg

SEQ ID NO: 669 - RNA, 23 nt, synthetic construct
  misc_feature 1..23: note = Description of Artificial Sequence: Synthetic oligonucleotide
  source 1..23: mol_type = other RNA
  modified_base 1: mod_base = OTHER; note = 2'-O-methyladenosine-3'-phosphorothioate
  modified_base 2: mod_base = OTHER; note = 2'-fluoroadenosine-3'-phosphorothioate
  modified_base 3: mod_base = OTHER; note = 2'-O-methyladenosine-3'-phosphate
  modified_base 4: mod_base = OTHER; note = 2'-O-methyladenosine-3'-phosphate
  modified_base 5: mod_base = OTHER; note = 2'-O-methylguanosine-3'-phosphate
  modified_base 6: mod_base = OTHER; note = 2'-fluorouridine-3'-phosphate
  modified_base 7: mod_base = OTHER; note = 2'-O-methyladenosine-3'-phosphate
  modified_base 8: mod_base = OTHER; note = 2'-fluorocytidine-3'-phosphate
  modified_base 9: mod_base = OTHER; note = 2'-fluorouridine-3'-phosphate
  modified_base 10: mod_base = OTHER; note = 2'-O-methylcytidine-3'-phosphate
  modified_base 11: mod_base = OTHER; note = 2'-O-methyladenosine-3'-phosphate
  modified_base 12: mod_base = OTHER; note = 2'-O-methylguanosine-3'-phosphate
  modified_base 13: mod_base = OTHER; note = 2'-O-methyladenosine-3'-phosphate
  modified_base 14: mod_base = OTHER; note = 2'-fluorocytidine-3'-phosphate
  modified_base 15: mod_base = OTHER; note = 2'-O-methyladenosine-3'-phosphate
  modified_base 16: mod_base = OTHER; note = 2'-fluorocytidine-3'-phosphate
  modified_base 17: mod_base = OTHER; note = 2'-O-methylcytidine-3'-phosphate
  modified_base 18: mod_base = OTHER; note = 2'-O-methyladenosine-3'-phosphate
  modified_base 19: mod_base = OTHER; note = 2'-O-methylcytidine-3'-phosphate
  modified_base 20: mod_base = OTHER; note = 2'-O-methyladenosine-3'-phosphate
  modified_base 21: mod_base = OTHER; note = 2'-O-methylguanosine-3'-phosphorothioate
  modified_base 22: mod_base = OTHER; note = 2'-O-methylcytidine-3'-phosphorothioate
  modified_base 23: mod_base = OTHER; note = 2'-O-methylcytidine-3'-phosphate
aaaagtactcagacaccacagcc

SEQ ID NO: 670 - RNA, 23 nt, synthetic construct
  misc_feature 1..23: note = Description of Artificial Sequence: Synthetic oligonucleotide
  source 1..23: mol_type = other RNA
  modified_base 1: mod_base = OTHER; note = 2'-O-methyladenosine-3'-phosphorothioate
  modified_base 2: mod_base = OTHER; note = 2'-fluorouridine -3'-phosphorothioate
  modified_base 3: mod_base = OTHER; note = 2'-O-methyluridine-3'-phosphate
  modified_base 4: mod_base = OTHER; note = 2'-O-methyluridine-3'-phosphate
  modified_base 5: mod_base = OTHER; note = 2'-O-methylguanosine-3'-phosphate
  modified_base 6: mod_base = OTHER; note = 2'-fluoroadenosine-3'-phosphate
  modified_base 7: mod_base = OTHER; note = 2'-O-methyladenosine-3'-phosphate
  modified_base 8: mod_base = OTHER; note = 2'-fluorocytidine-3'-phosphate
  modified_base 9: mod_base = OTHER; note = 2'-fluoroadenosine-3'-phosphate
  modified_base 10: mod_base = OTHER; note = 2'-O-methylcytidine-3'-phosphate
  modified_base 11: mod_base = OTHER; note = 2'-O-methyladenosine-3'-phosphate
  modified_base 12: mod_base = OTHER; note = 2'-O-methyluridine-3'-phosphate
  modified_base 13: mod_base = OTHER; note = 2'-O-methylguanosine-3'-phosphate
  modified_base 14: mod_base = OTHER; note = 2'-fluorouridine-3'-phosphate
  modified_base 15: mod_base = OTHER; note = 2'-O-methyluridine-3'-phosphate
  modified_base 16: mod_base = OTHER; note = 2'-fluoroguanosine-3'-phosphate
  modified_base 17: mod_base = OTHER; note = 2'-O-methylcytidine-3'-phosphate
  modified_base 18: mod_base = OTHER; note = 2'-O-methyluridine-3'-phosphate
  modified_base 19: mod_base = OTHER; note = 2'-O-methylcytidine-3'-phosphate
  modified_base 20: mod_base = OTHER; note = 2'-O-methyladenosine-3'-phosphate
  modified_base 21: mod_base = OTHER; note = 2'-O-methyluridine-3'-phosphorothioate
  modified_base 22: mod_base = OTHER; note = 2'-O-methyluridine-3'-phosphorothioate
  modified_base 23: mod_base = OTHER; note = 2'-O-methylguanosine-3'-phosphate
atttgaacacatgttgctcattg

SEQ ID NO: 671 - RNA, 23 nt, synthetic construct
  misc_feature 1..23: note = Description of Artificial Sequence: Synthetic oligonucleotide
  source 1..23: mol_type = other RNA
  modified_base 1: mod_base = OTHER; note = 2'-O-methyladenosine-3'-phosphorothioate
  modified_base 2: mod_base = OTHER; note = 2'-fluoroadenosine-3'-phosphorothioate
  modified_base 3: mod_base = OTHER; note = 2'-O-methyladenosine-3'-phosphate
  modified_base 4: mod_base = OTHER; note = 2'-O-methyluridine-3'-phosphate
  modified_base 5: mod_base = OTHER; note = 2'-O-methylguanosine-3'-phosphate
  modified_base 6: mod_base = OTHER; note = 2'-fluoroadenosine-3'-phosphate
  modified_base 7: mod_base = OTHER; note = 2'-O-methyladenosine-3'-phosphate
  modified_base 8: mod_base = OTHER; note = 2'-fluoroadenosine-3'-phosphate
  modified_base 9: mod_base = OTHER; note = 2'-fluorocytidine-3'-phosphate
  modified_base 10: mod_base = OTHER; note = 2'-O-methylguanosine-3'-phosphate
  modified_base 11: mod_base = OTHER; note = 2'-O-methyladenosine-3'-phosphate
  modified_base 12: mod_base = OTHER; note = 2'-O-methylcytidine-3'-phosphate
  modified_base 13: mod_base = OTHER; note = 2'-O-methyluridine-3'-phosphate
  modified_base 14: mod_base = OTHER; note = 2'-fluorouridine-3'-phosphate
  modified_base 15: mod_base = OTHER; note = 2'-O-methylcytidine-3'-phosphate
  modified_base 16: mod_base = OTHER; note = 2'-fluorouridine-3'-phosphate
  modified_base 17: mod_base = OTHER; note = 2'-O-methylcytidine-3'-phosphate
  modified_base 18: mod_base = OTHER; note = 2'-O-methyluridine-3'-phosphate
  modified_base 19: mod_base = OTHER; note = 2'-O-methyluridine-3'-phosphate
  modified_base 20: mod_base = OTHER; note = 2'-O-methylguanosine-3'-phosphate
  modified_base 21: mod_base = OTHER; note = 2'-O-methyluridine-3'-phosphorothioate
  modified_base 22: mod_base = OTHER; note = 2'-O-methylguanosine-3'-phosphorothioate
  modified_base 23: mod_base = OTHER; note = 2'-O-methyladenosine-3'-phosphate
aaatgaaacgacttctcttgtga

SEQ ID NO: 672 - RNA, 23 nt, synthetic construct
  misc_feature 1..23: note = Description of Artificial Sequence: Synthetic oligonucleotide
  source 1..23: mol_type = other RNA
  modified_base 1: mod_base = OTHER; note = 2'-O-methyladenosine-3'-phosphorothioate
  modified_base 2: mod_base = OTHER; note = 2'-fluorouridine -3'-phosphorothioate
  modified_base 3: mod_base = OTHER; note = 2'-O-methyluridine-3'-phosphate
  modified_base 4: mod_base = OTHER; note = 2'-O-methyluridine-3'-phosphate
  modified_base 5: mod_base = OTHER; note = 2'-O-methylcytidine-3'-phosphate
  modified_base 6: mod_base = OTHER; note = 2'-fluorocytidine-3'-phosphate
  modified_base 7: mod_base = OTHER; note = 2'-O-methyladenosine-3'-phosphate
  modified_base 8: mod_base = OTHER; note = 2'-fluorouridine-3'-phosphate
  modified_base 9: mod_base = OTHER; note = 2'-fluoroadenosine-3'-phosphate
  modified_base 10: mod_base = OTHER; note = 2'-O-methyluridine-3'-phosphate
  modified_base 11: mod_base = OTHER; note = 2'-O-methylcytidine-3'-phosphate
  modified_base 12: mod_base = OTHER; note = 2'-O-methylcytidine-3'-phosphate
  modified_base 13: mod_base = OTHER; note = 2'-O-methyluridine-3'-phosphate
  modified_base 14: mod_base = OTHER; note = 2'-fluorouridine-3'-phosphate
  modified_base 15: mod_base = OTHER; note = 2'-O-methylguanosine-3'-phosphate
  modified_base 16: mod_base = OTHER; note = 2'-fluoroadenosine-3'-phosphate
  modified_base 17: mod_base = OTHER; note = 2'-O-methylcytidine-3'-phosphate
  modified_base 18: mod_base = OTHER; note = 2'-O-methyluridine-3'-phosphate
  modified_base 19: mod_base = OTHER; note = 2'-O-methyluridine-3'-phosphate
  modified_base 20: mod_base = OTHER; note = 2'-O-methyluridine-3'-phosphate
  modified_base 21: mod_base = OTHER; note = 2'-O-methylguanosine-3'-phosphorothioate
  modified_base 22: mod_base = OTHER; note = 2'-O-methyladenosine-3'-phosphorothioate
  modified_base 23: mod_base = OTHER; note = 2'-O-methyladenosine-3'-phosphate
atttccatatccttgactttgaa

SEQ ID NO: 673 - RNA, 23 nt, synthetic construct
  misc_feature 1..23: note = Description of Artificial Sequence: Synthetic oligonucleotide
  source 1..23: mol_type = other RNA
  modified_base 1: mod_base = OTHER; note = 2'-O-methyladenosine-3'-phosphorothioate
  modified_base 2: mod_base = OTHER; note = 2'-fluorocytidine-3'-phosphorothioate
  modified_base 3: mod_base = OTHER; note = 2'-O-methyladenosine-3'-phosphate
  modified_base 4: mod_base = OTHER; note = 2'-O-methylcytidine-3'-phosphate
  modified_base 5: mod_base = OTHER; note = 2'-O-methyladenosine-3'-phosphate
  modified_base 6: mod_base = OTHER; note = 2'-fluoroadenosine-3'-phosphate
  modified_base 7: mod_base = OTHER; note = 2'-O-methyladenosine-3'-phosphate
  modified_base 8: mod_base = OTHER; note = 2'-fluoroguanosine-3'-phosphate
  modified_base 9: mod_base = OTHER; note = 2'-fluorouridine-3'-phosphate
  modified_base 10: mod_base = OTHER; note = 2'-O-methyladenosine-3'-phosphate
  modified_base 11: mod_base = OTHER; note = 2'-O-methylcytidine-3'-phosphate
  modified_base 12: mod_base = OTHER; note = 2'-O-methyluridine-3'-phosphate
  modified_base 13: mod_base = OTHER; note = 2'-O-methylcytidine-3'-phosphate
  modified_base 14: mod_base = OTHER; note = 2'-fluoroadenosine-3'-phosphate
  modified_base 15: mod_base = OTHER; note = 2'-O-methylguanosine-3'-phosphate
  modified_base 16: mod_base = OTHER; note = 2'-fluoroadenosine-3'-phosphate
  modified_base 17: mod_base = OTHER; note = 2'-O-methylcytidine-3'-phosphate
  modified_base 18: mod_base = OTHER; note = 2'-O-methyladenosine-3'-phosphate
  modified_base 19: mod_base = OTHER; note = 2'-O-methylcytidine-3'-phosphate
  modified_base 20: mod_base = OTHER; note = 2'-O-methylcytidine-3'-phosphate
  modified_base 21: mod_base = OTHER; note = 2'-O-methyladenosine-3'-phosphorothioate
  modified_base 22: mod_base = OTHER; note = 2'-O-methylcytidine-3'-phosphorothioate
  modified_base 23: mod_base = OTHER; note = 2'-O-methyladenosine-3'-phosphate
acacaaagtactcagacaccaca

SEQ ID NO: 674 - RNA, 23 nt, synthetic construct
  misc_feature 1..23: note = Description of Artificial Sequence: Synthetic oligonucleotide
  source 1..23: mol_type = other RNA
  modified_base 1: mod_base = OTHER; note = 2'-O-methyladenosine-3'-phosphorothioate
  modified_base 2: mod_base = OTHER; note = 2'-fluoroadenosine-3'-phosphorothioate
  modified_base 3: mod_base = OTHER; note = 2'-O-methylcytidine-3'-phosphate
  modified_base 4: mod_base = OTHER; note = 2'-O-methyluridine-3'-phosphate
  modified_base 5: mod_base = OTHER; note = 2'-O-methyluridine-3'-phosphate
  modified_base 6: mod_base = OTHER; note = 2'-fluoroguanosine-3'-phosphate
  modified_base 7: mod_base = OTHER; note = 2'-O-methyladenosine-3'-phosphate
  modified_base 8: mod_base = OTHER; note = 2'-fluoroadenosine-3'-phosphate
  modified_base 9: mod_base = OTHER; note = 2'-fluorouridine-3'-phosphate
  modified_base 10: mod_base = OTHER; note = 2'-O-methylguanosine-3'-phosphate
  modified_base 11: mod_base = OTHER; note = 2'-O-methyladenosine-3'-phosphate
  modified_base 12: mod_base = OTHER; note = 2'-O-methyladenosine-3'-phosphate
  modified_base 13: mod_base = OTHER; note = 2'-O-methyladenosine-3'-phosphate
  modified_base 14: mod_base = OTHER; note = 2'-fluorocytidine-3'-phosphate
  modified_base 15: mod_base = OTHER; note = 2'-O-methylguanosine-3'-phosphate
  modified_base 16: mod_base = OTHER; note = 2'-fluoroadenosine-3'-phosphate
  modified_base 17: mod_base = OTHER; note = 2'-O-methylcytidine-3'-phosphate
  modified_base 18: mod_base = OTHER; note = 2'-O-methyluridine-3'-phosphate
  modified_base 19: mod_base = OTHER; note = 2'-O-methyluridine-3'-phosphate
  modified_base 20: mod_base = OTHER; note = 2'-O-methylcytidine-3'-phosphate
  modified_base 21: mod_base = OTHER; note = 2'-O-methyluridine-3'-phosphorothioate
  modified_base 22: mod_base = OTHER; note = 2'-O-methylcytidine-3'-phosphorothioate
  modified_base 23: mod_base = OTHER; note = 2'-O-methyluridine-3'-phosphate
aacttgaatgaaacgacttctct

SEQ ID NO: 675 - RNA, 23 nt, synthetic construct
  misc_feature 1..23: note = Description of Artificial Sequence: Synthetic oligonucleotide
  source 1..23: mol_type = other RNA
  modified_base 1: mod_base = OTHER; note = 2'-O-methyladenosine-3'-phosphorothioate
  modified_base 2: mod_base = OTHER; note = 2'-fluorouridine -3'-phosphorothioate
  modified_base 3: mod_base = OTHER; note = 2'-O-methylcytidine-3'-phosphate
  modified_base 4: mod_base = OTHER; note = 2'-O-methylcytidine-3'-phosphate
  modified_base 5: mod_base = OTHER; note = 2'-O-methyladenosine-3'-phosphate
  modified_base 6: mod_base = OTHER; note = 2'-fluorouridine-3'-phosphate
  modified_base 7: mod_base = OTHER; note = 2'-O-methyladenosine-3'-phosphate
  modified_base 8: mod_base = OTHER; note = 2'-fluorouridine-3'-phosphate
  modified_base 9: mod_base = OTHER; note = 2'-fluorocytidine-3'-phosphate
  modified_base 10: mod_base = OTHER; note = 2'-O-methylcytidine-3'-phosphate
  modified_base 11: mod_base = OTHER; note = 2'-O-methyluridine-3'-phosphate
  modified_base 12: mod_base = OTHER; note = 2'-O-methyluridine-3'-phosphate
  modified_base 13: mod_base = OTHER; note = 2'-O-methylguanosine-3'-phosphate
  modified_base 14: mod_base = OTHER; note = 2'-fluoroadenosine-3'-phosphate
  modified_base 15: mod_base = OTHER; note = 2'-O-methylcytidine-3'-phosphate
  modified_base 16: mod_base = OTHER; note = 2'-fluorouridine-3'-phosphate
  modified_base 17: mod_base = OTHER; note = 2'-O-methyluridine-3'-phosphate
  modified_base 18: mod_base = OTHER; note = 2'-O-methyluridine-3'-phosphate
  modified_base 19: mod_base = OTHER; note = 2'-O-methylguanosine-3'-phosphate
  modified_base 20: mod_base = OTHER; note = 2'-O-methyladenosine-3'-phosphate
  modified_base 21: mod_base = OTHER; note = 2'-O-methyladenosine-3'-phosphorothioate
  modified_base 22: mod_base = OTHER; note = 2'-O-methylcytidine-3'-phosphorothioate
  modified_base 23: mod_base = OTHER; note = 2'-O-methyladenosine-3'-phosphate
atccatatccttgactttgaaca

SEQ ID NO: 676 - RNA, 23 nt, synthetic construct
  misc_feature 1..23: note = Description of Artificial Sequence: Synthetic oligonucleotide
  source 1..23: mol_type = other RNA
  modified_base 1: mod_base = OTHER; note = 2'-O-methyladenosine-3'-phosphorothioate
  modified_base 2: mod_base = OTHER; note = 2'-fluorouridine -3'-phosphorothioate
  modified_base 3: mod_base = OTHER; note = 2'-O-methyluridine-3'-phosphate
  modified_base 4: mod_base = OTHER; note = 2'-O-methylcytidine-3'-phosphate
  modified_base 5: mod_base = OTHER; note = 2'-O-methylcytidine-3'-phosphate
  modified_base 6: mod_base = OTHER; note = 2'-fluoroadenosine-3'-phosphate
  modified_base 7: mod_base = OTHER; note = 2'-O-methyluridine-3'-phosphate
  modified_base 8: mod_base = OTHER; note = 2'-fluoroadenosine-3'-phosphate
  modified_base 9: mod_base = OTHER; note = 2'-fluorouridine-3'-phosphate
  modified_base 10: mod_base = OTHER; note = 2'-O-methylcytidine-3'-phosphate
  modified_base 11: mod_base = OTHER; note = 2'-O-methylcytidine-3'-phosphate
  modified_base 12: mod_base = OTHER; note = 2'-O-methyluridine-3'-phosphate
  modified_base 13: mod_base = OTHER; note = 2'-O-methyluridine-3'-phosphate
  modified_base 14: mod_base = OTHER; note = 2'-fluoroguanosine-3'-phosphate
  modified_base 15: mod_base = OTHER; note = 2'-O-methyladenosine-3'-phosphate
  modified_base 16: mod_base = OTHER; note = 2'-fluorocytidine-3'-phosphate
  modified_base 17: mod_base = OTHER; note = 2'-O-methyluridine-3'-phosphate
  modified_base 18: mod_base = OTHER; note = 2'-O-methyluridine-3'-phosphate
  modified_base 19: mod_base = OTHER; note = 2'-O-methyluridine-3'-phosphate
  modified_base 20: mod_base = OTHER; note = 2'-O-methylguanosine-3'-phosphate
  modified_base 21: mod_base = OTHER; note = 2'-O-methyladenosine-3'-phosphorothioate
  modified_base 22: mod_base = OTHER; note = 2'-O-methyladenosine-3'-phosphorothioate
  modified_base 23: mod_base = OTHER; note = 2'-O-methylcytidine-3'-phosphate
attccatatccttgactttgaac

SEQ ID NO: 677 - RNA, 23 nt, synthetic construct
  misc_feature 1..23: note = Description of Artificial Sequence: Synthetic oligonucleotide
  source 1..23: mol_type = other RNA
  modified_base 1: mod_base = OTHER; note = 2'-O-methyladenosine-3'-phosphorothioate
  modified_base 2: mod_base = OTHER; note = 2'-fluoroadenosine-3'-phosphorothioate
  modified_base 3: mod_base = OTHER; note = 2'-O-methyluridine-3'-phosphate
  modified_base 4: mod_base = OTHER; note = 2'-O-methyluridine-3'-phosphate
  modified_base 5: mod_base = OTHER; note = 2'-O-methylcytidine-3'-phosphate
  modified_base 6: mod_base = OTHER; note = 2'-fluorouridine-3'-phosphate
  modified_base 7: mod_base = OTHER; note = 2'-O-methyluridine-3'-phosphate
  modified_base 8: mod_base = OTHER; note = 2'-fluoroguanosine-3'-phosphate
  modified_base 9: mod_base = OTHER; note = 2'-fluoroadenosine-3'-phosphate
  modified_base 10: mod_base = OTHER; note = 2'-O-methyluridine-3'-phosphate
  modified_base 11: mod_base = OTHER; note = 2'-O-methylguanosine-3'-phosphate
  modified_base 12: mod_base = OTHER; note = 2'-O-methyluridine-3'-phosphate
  modified_base 13: mod_base = OTHER; note = 2'-O-methyladenosine-3'-phosphate
  modified_base 14: mod_base = OTHER; note = 2'-fluoroguanosine-3'-phosphate
  modified_base 15: mod_base = OTHER; note = 2'-O-methyladenosine-3'-phosphate
  modified_base 16: mod_base = OTHER; note = 2'-fluorocytidine-3'-phosphate
  modified_base 17: mod_base = OTHER; note = 2'-O-methylcytidine-3'-phosphate
  modified_base 18: mod_base = OTHER; note = 2'-O-methyluridine-3'-phosphate
  modified_base 19: mod_base = OTHER; note = 2'-O-methylcytidine-3'-phosphate
  modified_base 20: mod_base = OTHER; note = 2'-O-methylcytidine-3'-phosphate
  modified_base 21: mod_base = OTHER; note = 2'-O-methyluridine-3'-phosphorothioate
  modified_base 22: mod_base = OTHER; note = 2'-O-methyluridine-3'-phosphorothioate
  modified_base 23: mod_base = OTHER; note = 2'-O-methylcytidine-3'-phosphate
aattcttgatgtagacctccttc

SEQ ID NO: 678 - RNA, 23 nt, synthetic construct
  misc_feature 1..23: note = Description of Artificial Sequence: Synthetic oligonucleotide
  source 1..23: mol_type = other RNA
  modified_base 1: mod_base = OTHER; note = 2'-O-methyladenosine-3'-phosphorothioate
  modified_base 2: mod_base = OTHER; note = 2'-fluorouridine -3'-phosphorothioate
  modified_base 3: mod_base = OTHER; note = 2'-O-methyluridine-3'-phosphate
  modified_base 4: mod_base = OTHER; note = 2'-O-methylguanosine-3'-phosphate
  modified_base 5: mod_base = OTHER; note = 2'-O-methyladenosine-3'-phosphate
  modified_base 6: mod_base = OTHER; note = 2'-fluorocytidine-3'-phosphate
  modified_base 7: mod_base = OTHER; note = 2'-O-methyluridine-3'-phosphate
  modified_base 8: mod_base = OTHER; note = 2'-fluorouridine-3'-phosphate
  modified_base 9: mod_base = OTHER; note = 2'-fluorouridine-3'-phosphate
  modified_base 10: mod_base = OTHER; note = 2'-O-methylguanosine-3'-phosphate
  modified_base 11: mod_base = OTHER; note = 2'-O-methyladenosine-3'-phosphate
  modified_base 12: mod_base = OTHER; note = 2'-O-methyladenosine-3'-phosphate
  modified_base 13: mod_base = OTHER; note = 2'-O-methylcytidine-3'-phosphate
  modified_base 14: mod_base = OTHER; note = 2'-fluoroadenosine-3'-phosphate
  modified_base 15: mod_base = OTHER; note = 2'-O-methylcytidine-3'-phosphate
  modified_base 16: mod_base = OTHER; note = 2'-fluoroadenosine-3'-phosphate
  modified_base 17: mod_base = OTHER; note = 2'-O-methyluridine-3'-phosphate
  modified_base 18: mod_base = OTHER; note = 2'-O-methylguanosine-3'-phosphate
  modified_base 19: mod_base = OTHER; note = 2'-O-methyluridine-3'-phosphate
  modified_base 20: mod_base = OTHER; note = 2'-O-methyluridine-3'-phosphate
  modified_base 21: mod_base = OTHER; note = 2'-O-methylguanosine-3'-phosphorothioate
  modified_base 22: mod_base = OTHER; note = 2'-O-methylcytidine-3'-phosphorothioate
  modified_base 23: mod_base = OTHER; note = 2'-O-methyluridine-3'-phosphate
attgactttgaacacatgttgct

SEQ ID NO: 679 - RNA, 23 nt, synthetic construct
  misc_feature 1..23: note = Description of Artificial Sequence: Synthetic oligonucleotide
  source 1..23: mol_type = other RNA
  modified_base 1: mod_base = OTHER; note = 2'-O-methyladenosine-3'-phosphorothioate
  modified_base 2: mod_base = OTHER; note = 2'-fluoroadenosine-3'-phosphorothioate
  modified_base 3: mod_base = OTHER; note = 2'-O-methylguanosine-3'-phosphate
  modified_base 4: mod_base = OTHER; note = 2'-O-methyladenosine-3'-phosphate
  modified_base 5: mod_base = OTHER; note = 2'-O-methylcytidine-3'-phosphate
  modified_base 6: mod_base = OTHER; note = 2'-fluoroadenosine-3'-phosphate
  modified_base 7: mod_base = OTHER; note = 2'-O-methyladenosine-3'-phosphate
  modified_base 8: mod_base = OTHER; note = 2'-fluoroadenosine-3'-phosphate
  modified_base 9: mod_base = OTHER; note = 2'-fluorouridine-3'-phosphate
  modified_base 10: mod_base = OTHER; note = 2'-O-methylguanosine-3'-phosphate
  modified_base 11: mod_base = OTHER; note = 2'-O-methylguanosine-3'-phosphate
  modified_base 12: mod_base = OTHER; note = 2'-O-methylguanosine-3'-phosphate
  modified_base 13: mod_base = OTHER; note = 2'-O-methylcytidine-3'-phosphate
  modified_base 14: mod_base = OTHER; note = 2'-fluorocytidine-3'-phosphate
  modified_base 15: mod_base = OTHER; note = 2'-O-methyluridine-3'-phosphate
  modified_base 16: mod_base = OTHER; note = 2'-fluoroguanosine-3'-phosphate
  modified_base 17: mod_base = OTHER; note = 2'-O-methyladenosine-3'-phosphate
  modified_base 18: mod_base = OTHER; note = 2'-O-methyluridine-3'-phosphate
  modified_base 19: mod_base = OTHER; note = 2'-O-methyladenosine-3'-phosphate
  modified_base 20: mod_base = OTHER; note = 2'-O-methylguanosine-3'-phosphate
  modified_base 21: mod_base = OTHER; note = 2'-O-methyluridine-3'-phosphorothioate
  modified_base 22: mod_base = OTHER; note = 2'-O-methylcytidine-3'-phosphorothioate
  modified_base 23: mod_base = OTHER; note = 2'-O-methyluridine-3'-phosphate
aagacaaatgggcctgatagtct

SEQ ID NO: 680 - RNA, 23 nt, synthetic construct
  misc_feature 1..23: note = Description of Artificial Sequence: Synthetic oligonucleotide
  source 1..23: mol_type = other RNA
  modified_base 1: mod_base = OTHER; note = 2'-O-methyladenosine-3'-phosphorothioate
  modified_base 2: mod_base = OTHER; note = 2'-fluoroadenosine-3'-phosphorothioate
  modified_base 3: mod_base = OTHER; note = 2'-O-methylcytidine-3'-phosphate
  modified_base 4: mod_base = OTHER; note = 2'-O-methyluridine-3'-phosphate
  modified_base 5: mod_base = OTHER; note = 2'-O-methyluridine-3'-phosphate
  modified_base 6: mod_base = OTHER; note = 2'-fluorouridine-3'-phosphate
  modified_base 7: mod_base = OTHER; note = 2'-O-methylguanosine-3'-phosphate
  modified_base 8: mod_base = OTHER; note = 2'-fluoroadenosine-3'-phosphate
  modified_base 9: mod_base = OTHER; note = 2'-fluoroadenosine-3'-phosphate
  modified_base 10: mod_base = OTHER; note = 2'-O-methylcytidine-3'-phosphate
  modified_base 11: mod_base = OTHER; note = 2'-O-methyladenosine-3'-phosphate
  modified_base 12: mod_base = OTHER; note = 2'-O-methylcytidine-3'-phosphate
  modified_base 13: mod_base = OTHER; note = 2'-O-methyladenosine-3'-phosphate
  modified_base 14: mod_base = OTHER; note = 2'-fluorouridine-3'-phosphate
  modified_base 15: mod_base = OTHER; note = 2'-O-methylguanosine-3'-phosphate
  modified_base 16: mod_base = OTHER; note = 2'-fluorouridine-3'-phosphate
  modified_base 17: mod_base = OTHER; note = 2'-O-methyluridine-3'-phosphate
  modified_base 18: mod_base = OTHER; note = 2'-O-methylguanosine-3'-phosphate
  modified_base 19: mod_base = OTHER; note = 2'-O-methylcytidine-3'-phosphate
  modified_base 20: mod_base = OTHER; note = 2'-O-methyluridine-3'-phosphate
  modified_base 21: mod_base = OTHER; note = 2'-O-methylcytidine-3'-phosphorothioate
  modified_base 22: mod_base = OTHER; note = 2'-O-methyladenosine-3'-phosphorothioate
  modified_base 23: mod_base = OTHER; note = 2'-O-methyluridine-3'-phosphate
aactttgaacacatgttgctcat

SEQ ID NO: 681 - RNA, 23 nt, synthetic construct
  misc_feature 1..23: note = Description of Artificial Sequence: Synthetic oligonucleotide
  source 1..23: mol_type = other RNA
  modified_base 1: mod_base = OTHER; note = 2'-O-methyladenosine-3'-phosphorothioate
  modified_base 2: mod_base = OTHER; note = 2'-fluoroadenosine-3'-phosphorothioate
  modified_base 3: mod_base = OTHER; note = 2'-O-methyluridine-3'-phosphate
  modified_base 4: mod_base = OTHER; note = 2'-O-methyladenosine-3'-phosphate
  modified_base 5: mod_base = OTHER; note = 2'-O-methylguanosine-3'-phosphate
  modified_base 6: mod_base = OTHER; note = 2'-fluoroadenosine-3'-phosphate
  modified_base 7: mod_base = OTHER; note = 2'-O-methylcytidine-3'-phosphate
  modified_base 8: mod_base = OTHER; note = 2'-fluoroadenosine-3'-phosphate
  modified_base 9: mod_base = OTHER; note = 2'-fluorouridine-3'-phosphate
  modified_base 10: mod_base = OTHER; note = 2'-O-methylcytidine-3'-phosphate
  modified_base 11: mod_base = OTHER; note = 2'-O-methylcytidine-3'-phosphate
  modified_base 12: mod_base = OTHER; note = 2'-O-methyladenosine-3'-phosphate
  modified_base 13: mod_base = OTHER; note = 2'-O-methylguanosine-3'-phosphate
  modified_base 14: mod_base = OTHER; note = 2'-fluoroadenosine-3'-phosphate
  modified_base 15: mod_base = OTHER; note = 2'-O-methyluridine-3'-phosphate
  modified_base 16: mod_base = OTHER; note = 2'-fluoroadenosine-3'-phosphate
  modified_base 17: mod_base = OTHER; note = 2'-O-methyladenosine-3'-phosphate
  modified_base 18: mod_base = OTHER; note = 2'-O-methyluridine-3'-phosphate
  modified_base 19: mod_base = OTHER; note = 2'-O-methylcytidine-3'-phosphate
  modified_base 20: mod_base = OTHER; note = 2'-O-methylcytidine-3'-phosphate
  modified_base 21: mod_base = OTHER; note = 2'-O-methyluridine-3'-phosphorothioate
  modified_base 22: mod_base = OTHER; note = 2'-O-methylcytidine-3'-phosphorothioate
  modified_base 23: mod_base = OTHER; note = 2'-O-methylcytidine-3'-phosphate
aatagacatccagataatcctcc

SEQ ID NO: 682 - RNA, 23 nt, synthetic construct
  misc_feature 1..23: note = Description of Artificial Sequence: Synthetic oligonucleotide
  source 1..23: mol_type = other RNA
  modified_base 1: mod_base = OTHER; note = 2'-O-methyladenosine-3'-phosphorothioate
  modified_base 2: mod_base = OTHER; note = 2'-fluoroadenosine-3'-phosphorothioate
  modified_base 3: mod_base = OTHER; note = 2'-O-methyluridine-3'-phosphate
  modified_base 4: mod_base = OTHER; note = 2'-O-methyladenosine-3'-phosphate
  modified_base 5: mod_base = OTHER; note = 2'-O-methyluridine-3'-phosphate
  modified_base 6: mod_base = OTHER; note = 2'-fluorocytidine-3'-phosphate
  modified_base 7: mod_base = OTHER; note = 2'-O-methylcytidine-3'-phosphate
  modified_base 8: mod_base = OTHER; note = 2'-fluorouridine-3'-phosphate
  modified_base 9: mod_base = OTHER; note = 2'-fluorouridine-3'-phosphate
  modified_base 10: mod_base = OTHER; note = 2'-O-methylguanosine-3'-phosphate
  modified_base 11: mod_base = OTHER; note = 2'-O-methyladenosine-3'-phosphate
  modified_base 12: mod_base = OTHER; note = 2'-O-methylcytidine-3'-phosphate
  modified_base 13: mod_base = OTHER; note = 2'-O-methyluridine-3'-phosphate
  modified_base 14: mod_base = OTHER; note = 2'-fluorouridine-3'-phosphate
  modified_base 15: mod_base = OTHER; note = 2'-O-methyluridine-3'-phosphate
  modified_base 16: mod_base = OTHER; note = 2'-fluoroguanosine-3'-phosphate
  modified_base 17: mod_base = OTHER; note = 2'-O-methyladenosine-3'-phosphate
  modified_base 18: mod_base = OTHER; note = 2'-O-methyladenosine-3'-phosphate
  modified_base 19: mod_base = OTHER; note = 2'-O-methylcytidine-3'-phosphate
  modified_base 20: mod_base = OTHER; note = 2'-O-methyladenosine-3'-phosphate
  modified_base 21: mod_base = OTHER; note = 2'-O-methylcytidine-3'-phosphorothioate
  modified_base 22: mod_base = OTHER; note = 2'-O-methyladenosine-3'-phosphorothioate
  modified_base 23: mod_base = OTHER; note = 2'-O-methyluridine-3'-phosphate
aatatccttgactttgaacacat

SEQ ID NO: 683 - RNA, 23 nt, synthetic construct
  misc_feature 1..23: note = Description of Artificial Sequence: Synthetic oligonucleotide
  source 1..23: mol_type = other RNA
  modified_base 1: mod_base = OTHER; note = 2'-O-methyladenosine-3'-phosphorothioate
  modified_base 2: mod_base = OTHER; note = 2'-fluorouridine -3'-phosphorothioate
  modified_base 3: mod_base = OTHER; note = 2'-O-methyluridine-3'-phosphate
  modified_base 4: mod_base = OTHER; note = 2'-O-methylcytidine-3'-phosphate
  modified_base 5: mod_base = OTHER; note = 2'-O-methyluridine-3'-phosphate
  modified_base 6: mod_base = OTHER; note = 2'-fluorouridine-3'-phosphate
  modified_base 7: mod_base = OTHER; note = 2'-O-methylguanosine-3'-phosphate
  modified_base 8: mod_base = OTHER; note = 2'-fluoroadenosine-3'-phosphate
  modified_base 9: mod_base = OTHER; note = 2'-fluorouridine-3'-phosphate
  modified_base 10: mod_base = OTHER; note = 2'-O-methylguanosine-3'-phosphate
  modified_base 11: mod_base = OTHER; note = 2'-O-methyluridine-3'-phosphate
  modified_base 12: mod_base = OTHER; note = 2'-O-methyladenosine-3'-phosphate
  modified_base 13: mod_base = OTHER; note = 2'-O-methylguanosine-3'-phosphate
  modified_base 14: mod_base = OTHER; note = 2'-fluoroadenosine-3'-phosphate
  modified_base 15: mod_base = OTHER; note = 2'-O-methylcytidine-3'-phosphate
  modified_base 16: mod_base = OTHER; note = 2'-fluorocytidine-3'-phosphate
  modified_base 17: mod_base = OTHER; note = 2'-O-methyluridine-3'-phosphate
  modified_base 18: mod_base = OTHER; note = 2'-O-methylcytidine-3'-phosphate
  modified_base 19: mod_base = OTHER; note = 2'-O-methylcytidine-3'-phosphate
  modified_base 20: mod_base = OTHER; note = 2'-O-methyluridine-3'-phosphate
  modified_base 21: mod_base = OTHER; note = 2'-O-methyluridine-3'-phosphorothioate
  modified_base 22: mod_base = OTHER; note = 2'-O-methylcytidine-3'-phosphorothioate
  modified_base 23: mod_base = OTHER; note = 2'-O-methylcytidine-3'-phosphate
attcttgatgtagacctccttcc

SEQ ID NO: 684 - RNA, 23 nt, synthetic construct
  misc_feature 1..23: note = Description of Artificial Sequence: Synthetic oligonucleotide
  source 1..23: mol_type = other RNA
  modified_base 1: mod_base = OTHER; note = 2'-O-methyladenosine-3'-phosphorothioate
  modified_base 2: mod_base = OTHER; note = 2'-fluorouridine -3'-phosphorothioate
  modified_base 3: mod_base = OTHER; note = 2'-O-methyladenosine-3'-phosphate
  modified_base 4: mod_base = OTHER; note = 2'-O-methylguanosine-3'-phosphate
  modified_base 5: mod_base = OTHER; note = 2'-O-methyladenosine-3'-phosphate
  modified_base 6: mod_base = OTHER; note = 2'-fluorouridine-3'-phosphate
  modified_base 7: mod_base = OTHER; note = 2'-O-methylguanosine-3'-phosphate
  modified_base 8: mod_base = OTHER; note = 2'-fluorouridine-3'-phosphate
  modified_base 9: mod_base = OTHER; note = 2'-fluorouridine-3'-phosphate
  modified_base 10: mod_base = OTHER; note = 2'-O-methylcytidine-3'-phosphate
  modified_base 11: mod_base = OTHER; note = 2'-O-methyladenosine-3'-phosphate
  modified_base 12: mod_base = OTHER; note = 2'-O-methyluridine-3'-phosphate
  modified_base 13: mod_base = OTHER; note = 2'-O-methylguanosine-3'-phosphate
  modified_base 14: mod_base = OTHER; note = 2'-fluoroguanosine-3'-phosphate
  modified_base 15: mod_base = OTHER; note = 2'-O-methyladenosine-3'-phosphate
  modified_base 16: mod_base = OTHER; note = 2'-fluoroguanosine-3'-phosphate
  modified_base 17: mod_base = OTHER; note = 2'-O-methylcytidine-3'-phosphate
  modified_base 18: mod_base = OTHER; note = 2'-O-methylcytidine-3'-phosphate
  modified_base 19: mod_base = OTHER; note = 2'-O-methyluridine-3'-phosphate
  modified_base 20: mod_base = OTHER; note = 2'-O-methylguanosine-3'-phosphate
  modified_base 21: mod_base = OTHER; note = 2'-O-methyladenosine-3'-phosphorothioate
  modified_base 22: mod_base = OTHER; note = 2'-O-methyladenosine-3'-phosphorothioate
  modified_base 23: mod_base = OTHER; note = 2'-O-methylguanosine-3'-phosphate
atagatgttcatggagcctgaag

SEQ ID NO: 685 - RNA, 23 nt, synthetic construct
  misc_feature 1..23: note = Description of Artificial Sequence: Synthetic oligonucleotide
  source 1..23: mol_type = other RNA
  modified_base 1: mod_base = OTHER; note = 2'-O-methyladenosine-3'-phosphorothioate
  modified_base 2: mod_base = OTHER; note = 2'-fluorouridine -3'-phosphorothioate
  modified_base 3: mod_base = OTHER; note = 2'-O-methylguanosine-3'-phosphate
  modified_base 4: mod_base = OTHER; note = 2'-O-methylguanosine-3'-phosphate
  modified_base 5: mod_base = OTHER; note = 2'-O-methyluridine-3'-phosphate
  modified_base 6: mod_base = OTHER; note = 2'-fluorouridine-3'-phosphate
  modified_base 7: mod_base = OTHER; note = 2'-O-methyluridine-3'-phosphate
  modified_base 8: mod_base = OTHER; note = 2'-fluorouridine-3'-phosphate
  modified_base 9: mod_base = OTHER; note = 2'-fluorouridine-3'-phosphate
  modified_base 10: mod_base = OTHER; note = 2'-O-methylguanosine-3'-phosphate
  modified_base 11: mod_base = OTHER; note = 2'-O-methylcytidine-3'-phosphate
  modified_base 12: mod_base = OTHER; note = 2'-O-methyladenosine-3'-phosphate
  modified_base 13: mod_base = OTHER; note = 2'-O-methylguanosine-3'-phosphate
  modified_base 14: mod_base = OTHER; note = 2'-fluoroadenosine-3'-phosphate
  modified_base 15: mod_base = OTHER; note = 2'-O-methylcytidine-3'-phosphate
  modified_base 16: mod_base = OTHER; note = 2'-fluoroadenosine-3'-phosphate
  modified_base 17: mod_base = OTHER; note = 2'-O-methyluridine-3'-phosphate
  modified_base 18: mod_base = OTHER; note = 2'-O-methylcytidine-3'-phosphate
  modified_base 19: mod_base = OTHER; note = 2'-O-methylcytidine-3'-phosphate
  modified_base 20: mod_base = OTHER; note = 2'-O-methyladenosine-3'-phosphate
  modified_base 21: mod_base = OTHER; note = 2'-O-methylcytidine-3'-phosphorothioate
  modified_base 22: mod_base = OTHER; note = 2'-O-methyluridine-3'-phosphorothioate
  modified_base 23: mod_base = OTHER; note = 2'-O-methyladenosine-3'-phosphate
atggtttttgcagacatccacta

SEQ ID NO: 686 - RNA, 23 nt, synthetic construct
  misc_feature 1..23: note = Description of Artificial Sequence: Synthetic oligonucleotide
  source 1..23: mol_type = other RNA
  modified_base 1: mod_base = OTHER; note = 2'-O-methyladenosine-3'-phosphorothioate
  modified_base 2: mod_base = OTHER; note = 2'-fluoroadenosine-3'-phosphorothioate
  modified_base 3: mod_base = OTHER; note = 2'-O-methyluridine-3'-phosphate
  modified_base 4: mod_base = OTHER; note = 2'-O-methyladenosine-3'-phosphate
  modified_base 5: mod_base = OTHER; note = 2'-O-methyluridine-3'-phosphate
  modified_base 6: mod_base = OTHER; note = 2'-fluorouridine-3'-phosphate
  modified_base 7: mod_base = OTHER; note = 2'-O-methylguanosine-3'-phosphate
  modified_base 8: mod_base = OTHER; note = 2'-fluoroadenosine-3'-phosphate
  modified_base 9: mod_base = OTHER; note = 2'-fluoroguanosine-3'-phosphate
  modified_base 10: mod_base = OTHER; note = 2'-O-methylcytidine-3'-phosphate
  modified_base 11: mod_base = OTHER; note = 2'-O-methyladenosine-3'-phosphate
  modified_base 12: mod_base = OTHER; note = 2'-O-methyluridine-3'-phosphate
  modified_base 13: mod_base = OTHER; note = 2'-O-methylcytidine-3'-phosphate
  modified_base 14: mod_base = OTHER; note = 2'-fluorouridine-3'-phosphate
  modified_base 15: mod_base = OTHER; note = 2'-O-methylcytidine-3'-phosphate
  modified_base 16: mod_base = OTHER; note = 2'-fluorouridine-3'-phosphate
  modified_base 17: mod_base = OTHER; note = 2'-O-methylcytidine-3'-phosphate
  modified_base 18: mod_base = OTHER; note = 2'-O-methyluridine-3'-phosphate
  modified_base 19: mod_base = OTHER; note = 2'-O-methylcytidine-3'-phosphate
  modified_base 20: mod_base = OTHER; note = 2'-O-methyladenosine-3'-phosphate
  modified_base 21: mod_base = OTHER; note = 2'-O-methylcytidine-3'-phosphorothioate
  modified_base 22: mod_base = OTHER; note = 2'-O-methyladenosine-3'-phosphorothioate
  modified_base 23: mod_base = OTHER; note = 2'-O-methylguanosine-3'-phosphate
aatattgagcatctctctcacag

SEQ ID NO: 687 - RNA, 23 nt, synthetic construct
  misc_feature 1..23: note = Description of Artificial Sequence: Synthetic oligonucleotide
  source 1..23: mol_type = other RNA
  modified_base 1: mod_base = OTHER; note = 2'-O-methyladenosine-3'-phosphorothioate
  modified_base 2: mod_base = OTHER; note = 2'-fluoroadenosine-3'-phosphorothioate
  modified_base 3: mod_base = OTHER; note = 2'-O-methyluridine-3'-phosphate
  modified_base 4: mod_base = OTHER; note = 2'-O-methyluridine-3'-phosphate
  modified_base 5: mod_base = OTHER; note = 2'-O-methylcytidine-3'-phosphate
  modified_base 6: mod_base = OTHER; note = 2'-fluoroadenosine-3'-phosphate
  modified_base 7: mod_base = OTHER; note = 2'-O-methylcytidine-3'-phosphate
  modified_base 8: mod_base = OTHER; note = 2'-fluorouridine-3'-phosphate
  modified_base 9: mod_base = OTHER; note = 2'-fluorouridine-3'-phosphate
  modified_base 10: mod_base = OTHER; note = 2'-O-methylguanosine-3'-phosphate
  modified_base 11: mod_base = OTHER; note = 2'-O-methylguanosine-3'-phosphate
  modified_base 12: mod_base = OTHER; note = 2'-O-methylcytidine-3'-phosphate
  modified_base 13: mod_base = OTHER; note = 2'-O-methyladenosine-3'-phosphate
  modified_base 14: mod_base = OTHER; note = 2'-fluoroguanosine-3'-phosphate
  modified_base 15: mod_base = OTHER; note = 2'-O-methylguanosine-3'-phosphate
  modified_base 16: mod_base = OTHER; note = 2'-fluorouridine-3'-phosphate
  modified_base 17: mod_base = OTHER; note = 2'-O-methylguanosine-3'-phosphate
  modified_base 18: mod_base = OTHER; note = 2'-O-methylcytidine-3'-phosphate
  modified_base 19: mod_base = OTHER; note = 2'-O-methylguanosine-3'-phosphate
  modified_base 20: mod_base = OTHER; note = 2'-O-methyladenosine-3'-phosphate
  modified_base 21: mod_base = OTHER; note = 2'-O-methyluridine-3'-phosphorothioate
  modified_base 22: mod_base = OTHER; note = 2'-O-methyluridine-3'-phosphorothioate
  modified_base 23: mod_base = OTHER; note = 2'-O-methylguanosine-3'-phosphate
aattcacttggcaggtgcgattg

SEQ ID NO: 688 - RNA, 23 nt, synthetic construct
  misc_feature 1..23: note = Description of Artificial Sequence: Synthetic oligonucleotide
  source 1..23: mol_type = other RNA
  modified_base 1: mod_base = OTHER; note = 2'-O-methyladenosine-3'-phosphorothioate
  modified_base 2: mod_base = OTHER; note = 2'-fluoroadenosine-3'-phosphorothioate
  modified_base 3: mod_base = OTHER; note = 2'-O-methylcytidine-3'-phosphate
  modified_base 4: mod_base = OTHER; note = 2'-O-methyladenosine-3'-phosphate
  modified_base 5: mod_base = OTHER; note = 2'-O-methylcytidine-3'-phosphate
  modified_base 6: mod_base = OTHER; note = 2'-fluorouridine-3'-phosphate
  modified_base 7: mod_base = OTHER; note = 2'-O-methyluridine-3'-phosphate
  modified_base 8: mod_base = OTHER; note = 2'-fluorouridine-3'-phosphate
  modified_base 9: mod_base = OTHER; note = 2'-fluorouridine-3'-phosphate
  modified_base 10: mod_base = OTHER; note = 2'-O-methyluridine-3'-phosphate
  modified_base 11: mod_base = OTHER; note = 2'-O-methylguanosine-3'-phosphate
  modified_base 12: mod_base = OTHER; note = 2'-O-methylguanosine-3'-phosphate
  modified_base 13: mod_base = OTHER; note = 2'-O-methylcytidine-3'-phosphate
  modified_base 14: mod_base = OTHER; note = 2'-fluorouridine-3'-phosphate
  modified_base 15: mod_base = OTHER; note = 2'-O-methylcytidine-3'-phosphate
  modified_base 16: mod_base = OTHER; note = 2'-fluorocytidine-3'-phosphate
  modified_base 17: mod_base = OTHER; note = 2'-O-methyluridine-3'-phosphate
  modified_base 18: mod_base = OTHER; note = 2'-O-methylguanosine-3'-phosphate
  modified_base 19: mod_base = OTHER; note = 2'-O-methyluridine-3'-phosphate
  modified_base 20: mod_base = OTHER; note = 2'-O-methylguanosine-3'-phosphate
  modified_base 21: mod_base = OTHER; note = 2'-O-methyladenosine-3'-phosphorothioate
  modified_base 22: mod_base = OTHER; note = 2'-O-methyladenosine-3'-phosphorothioate
  modified_base 23: mod_base = OTHER; note = 2'-O-methylguanosine-3'-phosphate
aacactttttggctcctgtgaag

SEQ ID NO: 689 - RNA, 23 nt, synthetic construct
  misc_feature 1..23: note = Description of Artificial Sequence: Synthetic oligonucleotide
  source 1..23: mol_type = other RNA
  modified_base 1: mod_base = OTHER; note = 2'-O-methyladenosine-3'-phosphorothioate
  modified_base 2: mod_base = OTHER; note = 2'-fluoroadenosine-3'-phosphorothioate
  modified_base 3: mod_base = OTHER; note = 2'-O-methyluridine-3'-phosphate
  modified_base 4: mod_base = OTHER; note = 2'-O-methyladenosine-3'-phosphate
  modified_base 5: mod_base = OTHER; note = 2'-O-methyladenosine-3'-phosphate
  modified_base 6: mod_base = OTHER; note = 2'-fluorouridine-3'-phosphate
  modified_base 7: mod_base = OTHER; note = 2'-O-methylcytidine-3'-phosphate
  modified_base 8: mod_base = OTHER; note = 2'-fluorocytidine-3'-phosphate
  modified_base 9: mod_base = OTHER; note = 2'-fluorouridine-3'-phosphate
  modified_base 10: mod_base = OTHER; note = 2'-O-methylcytidine-3'-phosphate
  modified_base 11: mod_base = OTHER; note = 2'-O-methylcytidine-3'-phosphate
  modified_base 12: mod_base = OTHER; note = 2'-O-methylcytidine-3'-phosphate
  modified_base 13: mod_base = OTHER; note = 2'-O-methyluridine-3'-phosphate
  modified_base 14: mod_base = OTHER; note = 2'-fluorouridine-3'-phosphate
  modified_base 15: mod_base = OTHER; note = 2'-O-methylguanosine-3'-phosphate
  modified_base 16: mod_base = OTHER; note = 2'-fluoroguanosine-3'-phosphate
  modified_base 17: mod_base = OTHER; note = 2'-O-methylguanosine-3'-phosphate
  modified_base 18: mod_base = OTHER; note = 2'-O-methyluridine-3'-phosphate
  modified_base 19: mod_base = OTHER; note = 2'-O-methyluridine-3'-phosphate
  modified_base 20: mod_base = OTHER; note = 2'-O-methyluridine-3'-phosphate
  modified_base 21: mod_base = OTHER; note = 2'-O-methyluridine-3'-phosphorothioate
  modified_base 22: mod_base = OTHER; note = 2'-O-methyluridine-3'-phosphorothioate
  modified_base 23: mod_base = OTHER; note = 2'-O-methylguanosine-3'-phosphate
aataatcctcccttgggtttttg

SEQ ID NO: 690 - RNA, 23 nt, synthetic construct
  misc_feature 1..23: note = Description of Artificial Sequence: Synthetic oligonucleotide
  source 1..23: mol_type = other RNA
  modified_base 1: mod_base = OTHER; note = 2'-O-methyladenosine-3'-phosphorothioate
  modified_base 2: mod_base = OTHER; note = 2'-fluorouridine -3'-phosphorothioate
  modified_base 3: mod_base = OTHER; note = 2'-O-methyladenosine-3'-phosphate
  modified_base 4: mod_base = OTHER; note = 2'-O-methyladenosine-3'-phosphate
  modified_base 5: mod_base = OTHER; note = 2'-O-methylguanosine-3'-phosphate
  modified_base 6: mod_base = OTHER; note = 2'-fluorouridine-3'-phosphate
  modified_base 7: mod_base = OTHER; note = 2'-O-methyluridine-3'-phosphate
  modified_base 8: mod_base = OTHER; note = 2'-fluoroguanosine-3'-phosphate
  modified_base 9: mod_base = OTHER; note = 2'-fluoroadenosine-3'-phosphate
  modified_base 10: mod_base = OTHER; note = 2'-O-methylcytidine-3'-phosphate
  modified_base 11: mod_base = OTHER; note = 2'-O-methyluridine-3'-phosphate
  modified_base 12: mod_base = OTHER; note = 2'-O-methyladenosine-3'-phosphate
  modified_base 13: mod_base = OTHER; note = 2'-O-methylguanosine-3'-phosphate
  modified_base 14: mod_base = OTHER; note = 2'-fluoroadenosine-3'-phosphate
  modified_base 15: mod_base = OTHER; note = 2'-O-methylcytidine-3'-phosphate
  modified_base 16: mod_base = OTHER; note = 2'-fluoroadenosine-3'-phosphate
  modified_base 17: mod_base = OTHER; note = 2'-O-methylcytidine-3'-phosphate
  modified_base 18: mod_base = OTHER; note = 2'-O-methyluridine-3'-phosphate
  modified_base 19: mod_base = OTHER; note = 2'-O-methyluridine-3'-phosphate
  modified_base 20: mod_base = OTHER; note = 2'-O-methyluridine-3'-phosphate
  modified_base 21: mod_base = OTHER; note = 2'-O-methyluridine-3'-phosphorothioate
  modified_base 22: mod_base = OTHER; note = 2'-O-methyluridine-3'-phosphorothioate
  modified_base 23: mod_base = OTHER; note = 2'-O-methylguanosine-3'-phosphate
ataagttgactagacactttttg

SEQ ID NO: 691 - RNA, 23 nt, synthetic construct
  misc_feature 1..23: note = Description of Artificial Sequence: Synthetic oligonucleotide
  source 1..23: mol_type = other RNA
  modified_base 1: mod_base = OTHER; note = 2'-O-methyladenosine-3'-phosphorothioate
  modified_base 2: mod_base = OTHER; note = 2'-fluorouridine -3'-phosphorothioate
  modified_base 3: mod_base = OTHER; note = 2'-O-methyladenosine-3'-phosphate
  modified_base 4: mod_base = OTHER; note = 2'-O-methyladenosine-3'-phosphate
  modified_base 5: mod_base = OTHER; note = 2'-O-methyluridine-3'-phosphate
  modified_base 6: mod_base = OTHER; note = 2'-fluorouridine-3'-phosphate
  modified_base 7: mod_base = OTHER; note = 2'-O-methylguanosine-3'-phosphate
  modified_base 8: mod_base = OTHER; note = 2'-fluoroadenosine-3'-phosphate
  modified_base 9: mod_base = OTHER; note = 2'-fluorouridine-3'-phosphate
  modified_base 10: mod_base = OTHER; note = 2'-O-methyluridine-3'-phosphate
  modified_base 11: mod_base = OTHER; note = 2'-O-methyluridine-3'-phosphate
  modified_base 12: mod_base = OTHER; note = 2'-O-methylcytidine-3'-phosphate
  modified_base 13: mod_base = OTHER; note = 2'-O-methyladenosine-3'-phosphate
  modified_base 14: mod_base = OTHER; note = 2'-fluorouridine-3'-phosphate
  modified_base 15: mod_base = OTHER; note = 2'-O-methyluridine-3'-phosphate
  modified_base 16: mod_base = OTHER; note = 2'-fluoroguanosine-3'-phosphate
  modified_base 17: mod_base = OTHER; note = 2'-O-methyladenosine-3'-phosphate
  modified_base 18: mod_base = OTHER; note = 2'-O-methylguanosine-3'-phosphate
  modified_base 19: mod_base = OTHER; note = 2'-O-methylcytidine-3'-phosphate
  modified_base 20: mod_base = OTHER; note = 2'-O-methyluridine-3'-phosphate
  modified_base 21: mod_base = OTHER; note = 2'-O-methylguanosine-3'-phosphorothioate
  modified_base 22: mod_base = OTHER; note = 2'-O-methylcytidine-3'-phosphorothioate
  modified_base 23: mod_base = OTHER; note = 2'-O-methyluridine-3'-phosphate
ataattgatttcattgagctgct

SEQ ID NO: 692 - RNA, 23 nt, synthetic construct
  misc_feature 1..23: note = Description of Artificial Sequence: Synthetic oligonucleotide
  source 1..23: mol_type = other RNA
  modified_base 1: mod_base = OTHER; note = 2'-O-methyladenosine-3'-phosphorothioate
  modified_base 2: mod_base = OTHER; note = 2'-fluoroadenosine-3'-phosphorothioate
  modified_base 3: mod_base = OTHER; note = 2'-O-methyladenosine-3'-phosphate
  modified_base 4: mod_base = OTHER; note = 2'-O-methylcytidine-3'-phosphate
  modified_base 5: mod_base = OTHER; note = 2'-O-methyladenosine-3'-phosphate
  modified_base 6: mod_base = OTHER; note = 2'-fluorocytidine-3'-phosphate
  modified_base 7: mod_base = OTHER; note = 2'-O-methyladenosine-3'-phosphate
  modified_base 8: mod_base = OTHER; note = 2'-fluorouridine-3'-phosphate
  modified_base 9: mod_base = OTHER; note = 2'-fluoroadenosine-3'-phosphate
  modified_base 10: mod_base = OTHER; note = 2'-O-methylguanosine-3'-phosphate
  modified_base 11: mod_base = OTHER; note = 2'-O-methyladenosine-3'-phosphate
  modified_base 12: mod_base = OTHER; note = 2'-O-methylcytidine-3'-phosphate
  modified_base 13: mod_base = OTHER; note = 2'-O-methyladenosine-3'-phosphate
  modified_base 14: mod_base = OTHER; note = 2'-fluorouridine-3'-phosphate
  modified_base 15: mod_base = OTHER; note = 2'-O-methylcytidine-3'-phosphate
  modified_base 16: mod_base = OTHER; note = 2'-fluorocytidine-3'-phosphate
  modified_base 17: mod_base = OTHER; note = 2'-O-methyladenosine-3'-phosphate
  modified_base 18: mod_base = OTHER; note = 2'-O-methylguanosine-3'-phosphate
  modified_base 19: mod_base = OTHER; note = 2'-O-methyladenosine-3'-phosphate
  modified_base 20: mod_base = OTHER; note = 2'-O-methyluridine-3'-phosphate
  modified_base 21: mod_base = OTHER; note = 2'-O-methyladenosine-3'-phosphorothioate
  modified_base 22: mod_base = OTHER; note = 2'-O-methyladenosine-3'-phosphorothioate
  modified_base 23: mod_base = OTHER; note = 2'-O-methyluridine-3'-phosphate
aaacacatagacatccagataat

SEQ ID NO: 693 - RNA, 23 nt, synthetic construct
  misc_feature 1..23: note = Description of Artificial Sequence: Synthetic oligonucleotide
  source 1..23: mol_type = other RNA
  modified_base 1: mod_base = OTHER; note = 2'-O-methyladenosine-3'-phosphorothioate
  modified_base 2: mod_base = OTHER; note = 2'-fluorouridine -3'-phosphorothioate
  modified_base 3: mod_base = OTHER; note = 2'-O-methyluridine-3'-phosphate
  modified_base 4: mod_base = OTHER; note = 2'-O-methyluridine-3'-phosphate
  modified_base 5: mod_base = OTHER; note = 2'-O-methyluridine-3'-phosphate
  modified_base 6: mod_base = OTHER; note = 2'-fluoroadenosine-3'-phosphate
  modified_base 7: mod_base = OTHER; note = 2'-O-methyladenosine-3'-phosphate
  modified_base 8: mod_base = OTHER; note = 2'-fluorouridine-3'-phosphate
  modified_base 9: mod_base = OTHER; note = 2'-fluorouridine-3'-phosphate
  modified_base 10: mod_base = OTHER; note = 2'-O-methylcytidine-3'-phosphate
  modified_base 11: mod_base = OTHER; note = 2'-O-methyladenosine-3'-phosphate
  modified_base 12: mod_base = OTHER; note = 2'-O-methyladenosine-3'-phosphate
  modified_base 13: mod_base = OTHER; note = 2'-O-methyluridine-3'-phosphate
  modified_base 14: mod_base = OTHER; note = 2'-fluorocytidine-3'-phosphate
  modified_base 15: mod_base = OTHER; note = 2'-O-methylcytidine-3'-phosphate
  modified_base 16: mod_base = OTHER; note = 2'-fluorocytidine-3'-phosphate
  modified_base 17: mod_base = OTHER; note = 2'-O-methyladenosine-3'-phosphate
  modified_base 18: mod_base = OTHER; note = 2'-O-methylcytidine-3'-phosphate
  modified_base 19: mod_base = OTHER; note = 2'-O-methylguanosine-3'-phosphate
  modified_base 20: mod_base = OTHER; note = 2'-O-methylcytidine-3'-phosphate
  modified_base 21: mod_base = OTHER; note = 2'-O-methylcytidine-3'-phosphorothioate
  modified_base 22: mod_base = OTHER; note = 2'-O-methylcytidine-3'-phosphorothioate
  modified_base 23: mod_base = OTHER; note = 2'-O-methylcytidine-3'-phosphate
attttaattcaatcccacgcccc

SEQ ID NO: 694 - RNA, 23 nt, synthetic construct
  misc_feature 1..23: note = Description of Artificial Sequence: Synthetic oligonucleotide
  source 1..23: mol_type = other RNA
  modified_base 1: mod_base = OTHER; note = 2'-O-methyladenosine-3'-phosphorothioate
  modified_base 2: mod_base = OTHER; note = 2'-fluorocytidine-3'-phosphorothioate
  modified_base 3: mod_base = OTHER; note = 2'-O-methyladenosine-3'-phosphate
  modified_base 4: mod_base = OTHER; note = 2'-O-methyluridine-3'-phosphate
  modified_base 5: mod_base = OTHER; note = 2'-O-methyladenosine-3'-phosphate
  modified_base 6: mod_base = OTHER; note = 2'-fluorouridine-3'-phosphate
  modified_base 7: mod_base = OTHER; note = 2'-O-methyluridine-3'-phosphate
  modified_base 8: mod_base = OTHER; note = 2'-fluoroguanosine-3'-phosphate
  modified_base 9: mod_base = OTHER; note = 2'-fluoroadenosine-3'-phosphate
  modified_base 10: mod_base = OTHER; note = 2'-O-methylguanosine-3'-phosphate
  modified_base 11: mod_base = OTHER; note = 2'-O-methylcytidine-3'-phosphate
  modified_base 12: mod_base = OTHER; note = 2'-O-methyladenosine-3'-phosphate
  modified_base 13: mod_base = OTHER; note = 2'-O-methyluridine-3'-phosphate
  modified_base 14: mod_base = OTHER; note = 2'-fluorocytidine-3'-phosphate
  modified_base 15: mod_base = OTHER; note = 2'-O-methyluridine-3'-phosphate
  modified_base 16: mod_base = OTHER; note = 2'-fluorocytidine-3'-phosphate
  modified_base 17: mod_base = OTHER; note = 2'-O-methyluridine-3'-phosphate
  modified_base 18: mod_base = OTHER; note = 2'-O-methylcytidine-3'-phosphate
  modified_base 19: mod_base = OTHER; note = 2'-O-methyluridine-3'-phosphate
  modified_base 20: mod_base = OTHER; note = 2'-O-methylcytidine-3'-phosphate
  modified_base 21: mod_base = OTHER; note = 2'-O-methyladenosine-3'-phosphorothioate
  modified_base 22: mod_base = OTHER; note = 2'-O-methylcytidine-3'-phosphorothioate
  modified_base 23: mod_base = OTHER; note = 2'-O-methyladenosine-3'-phosphate
acatattgagcatctctctcaca

SEQ ID NO: 695 - RNA, 23 nt, synthetic construct
  misc_feature 1..23: note = Description of Artificial Sequence: Synthetic oligonucleotide
  source 1..23: mol_type = other RNA
  modified_base 1: mod_base = OTHER; note = 2'-O-methyladenosine-3'-phosphorothioate
  modified_base 2: mod_base = OTHER; note = 2'-fluoroadenosine-3'-phosphorothioate
  modified_base 3: mod_base = OTHER; note = 2'-O-methylcytidine-3'-phosphate
  modified_base 4: mod_base = OTHER; note = 2'-O-methyladenosine-3'-phosphate
  modified_base 5: mod_base = OTHER; note = 2'-O-methyladenosine-3'-phosphate
  modified_base 6: mod_base = OTHER; note = 2'-fluoroadenosine-3'-phosphate
  modified_base 7: mod_base = OTHER; note = 2'-O-methylguanosine-3'-phosphate
  modified_base 8: mod_base = OTHER; note = 2'-fluorouridine-3'-phosphate
  modified_base 9: mod_base = OTHER; note = 2'-fluoroadenosine-3'-phosphate
  modified_base 10: mod_base = OTHER; note = 2'-O-methylcytidine-3'-phosphate
  modified_base 11: mod_base = OTHER; note = 2'-O-methyluridine-3'-phosphate
  modified_base 12: mod_base = OTHER; note = 2'-O-methylcytidine-3'-phosphate
  modified_base 13: mod_base = OTHER; note = 2'-O-methyladenosine-3'-phosphate
  modified_base 14: mod_base = OTHER; note = 2'-fluoroguanosine-3'-phosphate
  modified_base 15: mod_base = OTHER; note = 2'-O-methyladenosine-3'-phosphate
  modified_base 16: mod_base = OTHER; note = 2'-fluorocytidine-3'-phosphate
  modified_base 17: mod_base = OTHER; note = 2'-O-methyladenosine-3'-phosphate
  modified_base 18: mod_base = OTHER; note = 2'-O-methylcytidine-3'-phosphate
  modified_base 19: mod_base = OTHER; note = 2'-O-methylcytidine-3'-phosphate
  modified_base 20: mod_base = OTHER; note = 2'-O-methyladenosine-3'-phosphate
  modified_base 21: mod_base = OTHER; note = 2'-O-methylcytidine-3'-phosphorothioate
  modified_base 22: mod_base = OTHER; note = 2'-O-methyladenosine-3'-phosphorothioate
  modified_base 23: mod_base = OTHER; note = 2'-O-methylguanosine-3'-phosphate
aacaaagtactcagacaccacag

SEQ ID NO: 696 - RNA, 23 nt, synthetic construct
  misc_feature 1..23: note = Description of Artificial Sequence: Synthetic oligonucleotide
  source 1..23: mol_type = other RNA
  modified_base 1: mod_base = OTHER; note = 2'-O-methyladenosine-3'-phosphorothioate
  modified_base 2: mod_base = OTHER; note = 2'-fluoroadenosine-3'-phosphorothioate
  modified_base 3: mod_base = OTHER; note = 2'-O-methyladenosine-3'-phosphate
  modified_base 4: mod_base = OTHER; note = 2'-O-methyluridine-3'-phosphate
  modified_base 5: mod_base = OTHER; note = 2'-O-methyluridine-3'-phosphate
  modified_base 6: mod_base = OTHER; note = 2'-fluoroguanosine-3'-phosphate
  modified_base 7: mod_base = OTHER; note = 2'-O-methyladenosine-3'-phosphate
  modified_base 8: mod_base = OTHER; note = 2'-fluorouridine-3'-phosphate
  modified_base 9: mod_base = OTHER; note = 2'-fluorouridine-3'-phosphate
  modified_base 10: mod_base = OTHER; note = 2'-O-methyluridine-3'-phosphate
  modified_base 11: mod_base = OTHER; note = 2'-O-methylcytidine-3'-phosphate
  modified_base 12: mod_base = OTHER; note = 2'-O-methyladenosine-3'-phosphate
  modified_base 13: mod_base = OTHER; note = 2'-O-methyluridine-3'-phosphate
  modified_base 14: mod_base = OTHER; note = 2'-fluorouridine-3'-phosphate
  modified_base 15: mod_base = OTHER; note = 2'-O-methylguanosine-3'-phosphate
  modified_base 16: mod_base = OTHER; note = 2'-fluoroadenosine-3'-phosphate
  modified_base 17: mod_base = OTHER; note = 2'-O-methylguanosine-3'-phosphate
  modified_base 18: mod_base = OTHER; note = 2'-O-methylcytidine-3'-phosphate
  modified_base 19: mod_base = OTHER; note = 2'-O-methyluridine-3'-phosphate
  modified_base 20: mod_base = OTHER; note = 2'-O-methylguanosine-3'-phosphate
  modified_base 21: mod_base = OTHER; note = 2'-O-methylcytidine-3'-phosphorothioate
  modified_base 22: mod_base = OTHER; note = 2'-O-methyluridine-3'-phosphorothioate
  modified_base 23: mod_base = OTHER; note = 2'-O-methyluridine-3'-phosphate
aaattgatttcattgagctgctt

SEQ ID NO: 697 - RNA, 23 nt, synthetic construct
  misc_feature 1..23: note = Description of Artificial Sequence: Synthetic oligonucleotide
  source 1..23: mol_type = other RNA
  modified_base 1: mod_base = OTHER; note = 2'-O-methyladenosine-3'-phosphorothioate
  modified_base 2: mod_base = OTHER; note = 2'-fluoroadenosine-3'-phosphorothioate
  modified_base 3: mod_base = OTHER; note = 2'-O-methylcytidine-3'-phosphate
  modified_base 4: mod_base = OTHER; note = 2'-O-methyladenosine-3'-phosphate
  modified_base 5: mod_base = OTHER; note = 2'-O-methyluridine-3'-phosphate
  modified_base 6: mod_base = OTHER; note = 2'-fluorouridine-3'-phosphate
  modified_base 7: mod_base = OTHER; note = 2'-O-methylguanosine-3'-phosphate
  modified_base 8: mod_base = OTHER; note = 2'-fluorouridine-3'-phosphate
  modified_base 9: mod_base = OTHER; note = 2'-fluoroadenosine-3'-phosphate
  modified_base 10: mod_base = OTHER; note = 2'-O-methylguanosine-3'-phosphate
  modified_base 11: mod_base = OTHER; note = 2'-O-methyluridine-3'-phosphate
  modified_base 12: mod_base = OTHER; note = 2'-O-methyladenosine-3'-phosphate
  modified_base 13: mod_base = OTHER; note = 2'-O-methylguanosine-3'-phosphate
  modified_base 14: mod_base = OTHER; note = 2'-fluoroguanosine-3'-phosphate
  modified_base 15: mod_base = OTHER; note = 2'-O-methylguanosine-3'-phosphate
  modified_base 16: mod_base = OTHER; note = 2'-fluoroadenosine-3'-phosphate
  modified_base 17: mod_base = OTHER; note = 2'-O-methylguanosine-3'-phosphate
  modified_base 18: mod_base = OTHER; note = 2'-O-methyladenosine-3'-phosphate
  modified_base 19: mod_base = OTHER; note = 2'-O-methylcytidine-3'-phosphate
  modified_base 20: mod_base = OTHER; note = 2'-O-methylcytidine-3'-phosphate
  modified_base 21: mod_base = OTHER; note = 2'-O-methylguanosine-3'-phosphorothioate
  modified_base 22: mod_base = OTHER; note = 2'-O-methylguanosine-3'-phosphorothioate
  modified_base 23: mod_base = OTHER; note = 2'-O-methylguanosine-3'-phosphate
aacattgtagtagggagaccggg

SEQ ID NO: 698 - RNA, 23 nt, synthetic construct
  misc_feature 1..23: note = Description of Artificial Sequence: Synthetic oligonucleotide
  source 1..23: mol_type = other RNA
  modified_base 1: mod_base = OTHER; note = 2'-O-methyladenosine-3'-phosphorothioate
  modified_base 2: mod_base = OTHER; note = 2'-fluoroadenosine-3'-phosphorothioate
  modified_base 3: mod_base = OTHER; note = 2'-O-methylguanosine-3'-phosphate
  modified_base 4: mod_base = OTHER; note = 2'-O-methylcytidine-3'-phosphate
  modified_base 5: mod_base = OTHER; note = 2'-O-methyluridine-3'-phosphate
  modified_base 6: mod_base = OTHER; note = 2'-fluoroguanosine-3'-phosphate
  modified_base 7: mod_base = OTHER; note = 2'-O-methyluridine-3'-phosphate
  modified_base 8: mod_base = OTHER; note = 2'-fluorouridine-3'-phosphate
  modified_base 9: mod_base = OTHER; note = 2'-fluorouridine-3'-phosphate
  modified_base 10: mod_base = OTHER; note = 2'-O-methyluridine-3'-phosphate
  modified_base 11: mod_base = OTHER; note = 2'-O-methyladenosine-3'-phosphate
  modified_base 12: mod_base = OTHER; note = 2'-O-methyladenosine-3'-phosphate
  modified_base 13: mod_base = OTHER; note = 2'-O-methyluridine-3'-phosphate
  modified_base 14: mod_base = OTHER; note = 2'-fluorouridine-3'-phosphate
  modified_base 15: mod_base = OTHER; note = 2'-O-methylcytidine-3'-phosphate
  modified_base 16: mod_base = OTHER; note = 2'-fluoroadenosine-3'-phosphate
  modified_base 17: mod_base = OTHER; note = 2'-O-methyladenosine-3'-phosphate
  modified_base 18: mod_base = OTHER; note = 2'-O-methyluridine-3'-phosphate
  modified_base 19: mod_base = OTHER; note = 2'-O-methylcytidine-3'-phosphate
  modified_base 20: mod_base = OTHER; note = 2'-O-methylcytidine-3'-phosphate
  modified_base 21: mod_base = OTHER; note = 2'-O-methylcytidine-3'-phosphorothioate
  modified_base 22: mod_base = OTHER; note = 2'-O-methyladenosine-3'-phosphorothioate
  modified_base 23: mod_base = OTHER; note = 2'-O-methylcytidine-3'-phosphate
aagctgttttaattcaatcccac

SEQ ID NO: 699 - RNA, 23 nt, synthetic construct
  misc_feature 1..23: note = Description of Artificial Sequence: Synthetic oligonucleotide
  source 1..23: mol_type = other RNA
  modified_base 1: mod_base = OTHER; note = 2'-O-methyladenosine-3'-phosphorothioate
  modified_base 2: mod_base = OTHER; note = 2'-fluoroadenosine-3'-phosphorothioate
  modified_base 3: mod_base = OTHER; note = 2'-O-methylguanosine-3'-phosphate
  modified_base 4: mod_base = OTHER; note = 2'-O-methyladenosine-3'-phosphate
  modified_base 5: mod_base = OTHER; note = 2'-O-methyluridine-3'-phosphate
  modified_base 6: mod_base = OTHER; note = 2'-fluoroadenosine-3'-phosphate
  modified_base 7: mod_base = OTHER; note = 2'-O-methyladenosine-3'-phosphate
  modified_base 8: mod_base = OTHER; note = 2'-fluorouridine-3'-phosphate
  modified_base 9: mod_base = OTHER; note = 2'-fluorocytidine-3'-phosphate
  modified_base 10: mod_base = OTHER; note = 2'-O-methylcytidine-3'-phosphate
  modified_base 11: mod_base = OTHER; note = 2'-O-methyluridine-3'-phosphate
  modified_base 12: mod_base = OTHER; note = 2'-O-methylcytidine-3'-phosphate
  modified_base 13: mod_base = OTHER; note = 2'-O-methylcytidine-3'-phosphate
  modified_base 14: mod_base = OTHER; note = 2'-fluorocytidine-3'-phosphate
  modified_base 15: mod_base = OTHER; note = 2'-O-methyluridine-3'-phosphate
  modified_base 16: mod_base = OTHER; note = 2'-fluorouridine-3'-phosphate
  modified_base 17: mod_base = OTHER; note = 2'-O-methylguanosine-3'-phosphate
  modified_base 18: mod_base = OTHER; note = 2'-O-methylguanosine-3'-phosphate
  modified_base 19: mod_base = OTHER; note = 2'-O-methylguanosine-3'-phosphate
  modified_base 20: mod_base = OTHER; note = 2'-O-methyluridine-3'-phosphate
  modified_base 21: mod_base = OTHER; note = 2'-O-methyluridine-3'-phosphorothioate
  modified_base 22: mod_base = OTHER; note = 2'-O-methyluridine-3'-phosphorothioate
  modified_base 23: mod_base = OTHER; note = 2'-O-methyluridine-3'-phosphate
aagataatcctcccttgggtttt

SEQ ID NO: 700 - RNA, 23 nt, synthetic construct
  misc_feature 1..23: note = Description of Artificial Sequence: Synthetic oligonucleotide
  source 1..23: mol_type = other RNA
  modified_base 1: mod_base = OTHER; note = 2'-O-methyladenosine-3'-phosphorothioate
  modified_base 2: mod_base = OTHER; note = 2'-fluoroadenosine-3'-phosphorothioate
  modified_base 3: mod_base = OTHER; note = 2'-O-methyladenosine-3'-phosphate
  modified_base 4: mod_base = OTHER; note = 2'-O-methyladenosine-3'-phosphate
  modified_base 5: mod_base = OTHER; note = 2'-O-methylguanosine-3'-phosphate
  modified_base 6: mod_base = OTHER; note = 2'-fluoroadenosine-3'-phosphate
  modified_base 7: mod_base = OTHER; note = 2'-O-methylguanosine-3'-phosphate
  modified_base 8: mod_base = OTHER; note = 2'-fluoroadenosine-3'-phosphate
  modified_base 9: mod_base = OTHER; note = 2'-fluorouridine-3'-phosphate
  modified_base 10: mod_base = OTHER; note = 2'-O-methylcytidine-3'-phosphate
  modified_base 11: mod_base = OTHER; note = 2'-O-methyluridine-3'-phosphate
  modified_base 12: mod_base = OTHER; note = 2'-O-methylcytidine-3'-phosphate
  modified_base 13: mod_base = OTHER; note = 2'-O-methyladenosine-3'-phosphate
  modified_base 14: mod_base = OTHER; note = 2'-fluorouridine-3'-phosphate
  modified_base 15: mod_base = OTHER; note = 2'-O-methylcytidine-3'-phosphate
  modified_base 16: mod_base = OTHER; note = 2'-fluoroadenosine-3'-phosphate
  modified_base 17: mod_base = OTHER; note = 2'-O-methylcytidine-3'-phosphate
  modified_base 18: mod_base = OTHER; note = 2'-O-methyluridine-3'-phosphate
  modified_base 19: mod_base = OTHER; note = 2'-O-methylcytidine-3'-phosphate
  modified_base 20: mod_base = OTHER; note = 2'-O-methyladenosine-3'-phosphate
  modified_base 21: mod_base = OTHER; note = 2'-O-methylcytidine-3'-phosphorothioate
  modified_base 22: mod_base = OTHER; note = 2'-O-methyladenosine-3'-phosphorothioate
  modified_base 23: mod_base = OTHER; note = 2'-O-methyluridine-3'-phosphate
aaaagagatctcatcactcacat

SEQ ID NO: 701 - RNA, 23 nt, synthetic construct
  misc_feature 1..23: note = Description of Artificial Sequence: Synthetic oligonucleotide
  source 1..23: mol_type = other RNA
  modified_base 1: mod_base = OTHER; note = 2'-O-methyladenosine-3'-phosphorothioate
  modified_base 2: mod_base = OTHER; note = 2'-fluorocytidine-3'-phosphorothioate
  modified_base 3: mod_base = OTHER; note = 2'-O-methylcytidine-3'-phosphate
  modified_base 4: mod_base = OTHER; note = 2'-O-methyluridine-3'-phosphate
  modified_base 5: mod_base = OTHER; note = 2'-O-methyluridine-3'-phosphate
  modified_base 6: mod_base = OTHER; note = 2'-fluoroguanosine-3'-phosphate
  modified_base 7: mod_base = OTHER; note = 2'-O-methyladenosine-3'-phosphate
  modified_base 8: mod_base = OTHER; note = 2'-fluorocytidine-3'-phosphate
  modified_base 9: mod_base = OTHER; note = 2'-fluorouridine-3'-phosphate
  modified_base 10: mod_base = OTHER; note = 2'-O-methyluridine-3'-phosphate
  modified_base 11: mod_base = OTHER; note = 2'-O-methyluridine-3'-phosphate
  modified_base 12: mod_base = OTHER; note = 2'-O-methylguanosine-3'-phosphate
  modified_base 13: mod_base = OTHER; note = 2'-O-methyladenosine-3'-phosphate
  modified_base 14: mod_base = OTHER; note = 2'-fluoroadenosine-3'-phosphate
  modified_base 15: mod_base = OTHER; note = 2'-O-methylcytidine-3'-phosphate
  modified_base 16: mod_base = OTHER; note = 2'-fluoroadenosine-3'-phosphate
  modified_base 17: mod_base = OTHER; note = 2'-O-methylcytidine-3'-phosphate
  modified_base 18: mod_base = OTHER; note = 2'-O-methyladenosine-3'-phosphate
  modified_base 19: mod_base = OTHER; note = 2'-O-methyluridine-3'-phosphate
  modified_base 20: mod_base = OTHER; note = 2'-O-methylguanosine-3'-phosphate
  modified_base 21: mod_base = OTHER; note = 2'-O-methyluridine-3'-phosphorothioate
  modified_base 22: mod_base = OTHER; note = 2'-O-methyluridine-3'-phosphorothioate
  modified_base 23: mod_base = OTHER; note = 2'-O-methylguanosine-3'-phosphate
accttgactttgaacacatgttg

SEQ ID NO: 702 - RNA, 23 nt, synthetic construct
  misc_feature 1..23: note = Description of Artificial Sequence: Synthetic oligonucleotide
  source 1..23: mol_type = other RNA
  modified_base 1: mod_base = OTHER; note = 2'-O-methyladenosine-3'-phosphorothioate
  modified_base 2: mod_base = OTHER; note = 2'-fluoroadenosine-3'-phosphorothioate
  modified_base 3: mod_base = OTHER; note = 2'-O-methyladenosine-3'-phosphate
  modified_base 4: mod_base = OTHER; note = 2'-O-methyluridine-3'-phosphate
  modified_base 5: mod_base = OTHER; note = 2'-O-methyluridine-3'-phosphate
  modified_base 6: mod_base = OTHER; note = 2'-fluoroadenosine-3'-phosphate
  modified_base 7: mod_base = OTHER; note = 2'-O-methyladenosine-3'-phosphate
  modified_base 8: mod_base = OTHER; note = 2'-fluoroguanosine-3'-phosphate
  modified_base 9: mod_base = OTHER; note = 2'-fluorouridine-3'-phosphate
  modified_base 10: mod_base = OTHER; note = 2'-O-methyluridine-3'-phosphate
  modified_base 11: mod_base = OTHER; note = 2'-O-methylguanosine-3'-phosphate
  modified_base 12: mod_base = OTHER; note = 2'-O-methyladenosine-3'-phosphate
  modified_base 13: mod_base = OTHER; note = 2'-O-methylcytidine-3'-phosphate
  modified_base 14: mod_base = OTHER; note = 2'-fluorouridine-3'-phosphate
  modified_base 15: mod_base = OTHER; note = 2'-O-methyladenosine-3'-phosphate
  modified_base 16: mod_base = OTHER; note = 2'-fluoroguanosine-3'-phosphate
  modified_base 17: mod_base = OTHER; note = 2'-O-methyladenosine-3'-phosphate
  modified_base 18: mod_base = OTHER; note = 2'-O-methylcytidine-3'-phosphate
  modified_base 19: mod_base = OTHER; note = 2'-O-methyladenosine-3'-phosphate
  modified_base 20: mod_base = OTHER; note = 2'-O-methylcytidine-3'-phosphate
  modified_base 21: mod_base = OTHER; note = 2'-O-methyluridine-3'-phosphorothioate
  modified_base 22: mod_base = OTHER; note = 2'-O-methyluridine-3'-phosphorothioate
  modified_base 23: mod_base = OTHER; note = 2'-O-methyluridine-3'-phosphate
aaattaagttgactagacacttt

SEQ ID NO: 703 - RNA, 23 nt, synthetic construct
  misc_feature 1..23: note = Description of Artificial Sequence: Synthetic oligonucleotide
  source 1..23: mol_type = other RNA
  modified_base 1: mod_base = OTHER; note = 2'-O-methyladenosine-3'-phosphorothioate
  modified_base 2: mod_base = OTHER; note = 2'-fluorouridine -3'-phosphorothioate
  modified_base 3: mod_base = OTHER; note = 2'-O-methyluridine-3'-phosphate
  modified_base 4: mod_base = OTHER; note = 2'-O-methyluridine-3'-phosphate
  modified_base 5: mod_base = OTHER; note = 2'-O-methyladenosine-3'-phosphate
  modified_base 6: mod_base = OTHER; note = 2'-fluoroadenosine-3'-phosphate
  modified_base 7: mod_base = OTHER; note = 2'-O-methyluridine-3'-phosphate
  modified_base 8: mod_base = OTHER; note = 2'-fluorouridine-3'-phosphate
  modified_base 9: mod_base = OTHER; note = 2'-fluorocytidine-3'-phosphate
  modified_base 10: mod_base = OTHER; note = 2'-O-methyladenosine-3'-phosphate
  modified_base 11: mod_base = OTHER; note = 2'-O-methyladenosine-3'-phosphate
  modified_base 12: mod_base = OTHER; note = 2'-O-methyluridine-3'-phosphate
  modified_base 13: mod_base = OTHER; note = 2'-O-methylcytidine-3'-phosphate
  modified_base 14: mod_base = OTHER; note = 2'-fluorocytidine-3'-phosphate
  modified_base 15: mod_base = OTHER; note = 2'-O-methylcytidine-3'-phosphate
  modified_base 16: mod_base = OTHER; note = 2'-fluoroadenosine-3'-phosphate
  modified_base 17: mod_base = OTHER; note = 2'-O-methylcytidine-3'-phosphate
  modified_base 18: mod_base = OTHER; note = 2'-O-methylguanosine-3'-phosphate
  modified_base 19: mod_base = OTHER; note = 2'-O-methylcytidine-3'-phosphate
  modified_base 20: mod_base = OTHER; note = 2'-O-methylcytidine-3'-phosphate
  modified_base 21: mod_base = OTHER; note = 2'-O-methylcytidine-3'-phosphorothioate
  modified_base 22: mod_base = OTHER; note = 2'-O-methylcytidine-3'-phosphorothioate
  modified_base 23: mod_base = OTHER; note = 2'-O-methyluridine-3'-phosphate
atttaattcaatcccacgcccct

SEQ ID NO: 704 - RNA, 23 nt, synthetic construct
  misc_feature 1..23: note = Description of Artificial Sequence: Synthetic oligonucleotide
  source 1..23: mol_type = other RNA
  modified_base 1: mod_base = OTHER; note = 2'-O-methyladenosine-3'-phosphorothioate
  modified_base 2: mod_base = OTHER; note = 2'-fluoroadenosine-3'-phosphorothioate
  modified_base 3: mod_base = OTHER; note = 2'-O-methyladenosine-3'-phosphate
  modified_base 4: mod_base = OTHER; note = 2'-O-methyladenosine-3'-phosphate
  modified_base 5: mod_base = OTHER; note = 2'-O-methylguanosine-3'-phosphate
  modified_base 6: mod_base = OTHER; note = 2'-fluorocytidine-3'-phosphate
  modified_base 7: mod_base = OTHER; note = 2'-O-methyladenosine-3'-phosphate
  modified_base 8: mod_base = OTHER; note = 2'-fluorouridine-3'-phosphate
  modified_base 9: mod_base = OTHER; note = 2'-fluorouridine-3'-phosphate
  modified_base 10: mod_base = OTHER; note = 2'-O-methylguanosine-3'-phosphate
  modified_base 11: mod_base = OTHER; note = 2'-O-methyladenosine-3'-phosphate
  modified_base 12: mod_base = OTHER; note = 2'-O-methyluridine-3'-phosphate
  modified_base 13: mod_base = OTHER; note = 2'-O-methylguanosine-3'-phosphate
  modified_base 14: mod_base = OTHER; note = 2'-fluorouridine-3'-phosphate
  modified_base 15: mod_base = OTHER; note = 2'-O-methyluridine-3'-phosphate
  modified_base 16: mod_base = OTHER; note = 2'-fluorocytidine-3'-phosphate
  modified_base 17: mod_base = OTHER; note = 2'-O-methyladenosine-3'-phosphate
  modified_base 18: mod_base = OTHER; note = 2'-O-methylcytidine-3'-phosphate
  modified_base 19: mod_base = OTHER; note = 2'-O-methyluridine-3'-phosphate
  modified_base 20: mod_base = OTHER; note = 2'-O-methyluridine-3'-phosphate
  modified_base 21: mod_base = OTHER; note = 2'-O-methylguanosine-3'-phosphorothioate
  modified_base 22: mod_base = OTHER; note = 2'-O-methylguanosine-3'-phosphorothioate
  modified_base 23: mod_base = OTHER; note = 2'-O-methyluridine-3'-phosphate
aaaagcattgatgttcacttggt

SEQ ID NO: 705 - RNA, 23 nt, synthetic construct
  misc_feature 1..23: note = Description of Artificial Sequence: Synthetic oligonucleotide
  source 1..23: mol_type = other RNA
  modified_base 1: mod_base = OTHER; note = 2'-O-methyladenosine-3'-phosphorothioate
  modified_base 2: mod_base = OTHER; note = 2'-fluorouridine -3'-phosphorothioate
  modified_base 3: mod_base = OTHER; note = 2'-O-methyladenosine-3'-phosphate
  modified_base 4: mod_base = OTHER; note = 2'-O-methylguanosine-3'-phosphate
  modified_base 5: mod_base = OTHER; note = 2'-O-methyluridine-3'-phosphate
  modified_base 6: mod_base = OTHER; note = 2'-fluorocytidine-3'-phosphate
  modified_base 7: mod_base = OTHER; note = 2'-O-methyladenosine-3'-phosphate
  modified_base 8: mod_base = OTHER; note = 2'-fluorouridine-3'-phosphate
  modified_base 9: mod_base = OTHER; note = 2'-fluoroadenosine-3'-phosphate
  modified_base 10: mod_base = OTHER; note = 2'-O-methyladenosine-3'-phosphate
  modified_base 11: mod_base = OTHER; note = 2'-O-methyladenosine-3'-phosphate
  modified_base 12: mod_base = OTHER; note = 2'-O-methyladenosine-3'-phosphate
  modified_base 13: mod_base = OTHER; note = 2'-O-methyluridine-3'-phosphate
  modified_base 14: mod_base = OTHER; note = 2'-fluorouridine-3'-phosphate
  modified_base 15: mod_base = OTHER; note = 2'-O-methylcytidine-3'-phosphate
  modified_base 16: mod_base = OTHER; note = 2'-fluoroadenosine-3'-phosphate
  modified_base 17: mod_base = OTHER; note = 2'-O-methylguanosine-3'-phosphate
  modified_base 18: mod_base = OTHER; note = 2'-O-methylguanosine-3'-phosphate
  modified_base 19: mod_base = OTHER; note = 2'-O-methyladenosine-3'-phosphate
  modified_base 20: mod_base = OTHER; note = 2'-O-methyladenosine-3'-phosphate
  modified_base 21: mod_base = OTHER; note = 2'-O-methyluridine-3'-phosphorothioate
  modified_base 22: mod_base = OTHER; note = 2'-O-methyluridine-3'-phosphorothioate
  modified_base 23: mod_base = OTHER; note = 2'-O-methylcytidine-3'-phosphate
atagtcataaaattcaggaattc

SEQ ID NO: 706 - RNA, 23 nt, synthetic construct
  misc_feature 1..23: note = Description of Artificial Sequence: Synthetic oligonucleotide
  source 1..23: mol_type = other RNA
  modified_base 1: mod_base = OTHER; note = 2'-O-methyladenosine-3'-phosphorothioate
  modified_base 2: mod_base = OTHER; note = 2'-fluorouridine -3'-phosphorothioate
  modified_base 3: mod_base = OTHER; note = 2'-O-methylcytidine-3'-phosphate
  modified_base 4: mod_base = OTHER; note = 2'-O-methyladenosine-3'-phosphate
  modified_base 5: mod_base = OTHER; note = 2'-O-methyluridine-3'-phosphate
  modified_base 6: mod_base = OTHER; note = 2'-fluoroadenosine-3'-phosphate
  modified_base 7: mod_base = OTHER; note = 2'-O-methyladenosine-3'-phosphate
  modified_base 8: mod_base = OTHER; note = 2'-fluorouridine-3'-phosphate
  modified_base 9: mod_base = OTHER; note = 2'-fluorouridine-3'-phosphate
  modified_base 10: mod_base = OTHER; note = 2'-O-methylguanosine-3'-phosphate
  modified_base 11: mod_base = OTHER; note = 2'-O-methyladenosine-3'-phosphate
  modified_base 12: mod_base = OTHER; note = 2'-O-methyluridine-3'-phosphate
  modified_base 13: mod_base = OTHER; note = 2'-O-methyluridine-3'-phosphate
  modified_base 14: mod_base = OTHER; note = 2'-fluorouridine-3'-phosphate
  modified_base 15: mod_base = OTHER; note = 2'-O-methylcytidine-3'-phosphate
  modified_base 16: mod_base = OTHER; note = 2'-fluoroadenosine-3'-phosphate
  modified_base 17: mod_base = OTHER; note = 2'-O-methyluridine-3'-phosphate
  modified_base 18: mod_base = OTHER; note = 2'-O-methyluridine-3'-phosphate
  modified_base 19: mod_base = OTHER; note = 2'-O-methylguanosine-3'-phosphate
  modified_base 20: mod_base = OTHER; note = 2'-O-methyladenosine-3'-phosphate
  modified_base 21: mod_base = OTHER; note = 2'-O-methylguanosine-3'-phosphorothioate
  modified_base 22: mod_base = OTHER; note = 2'-O-methylcytidine-3'-phosphorothioate
  modified_base 23: mod_base = OTHER; note = 2'-O-methyluridine-3'-phosphate
atcataattgatttcattgagct

SEQ ID NO: 707 - RNA, 23 nt, synthetic construct
  misc_feature 1..23: note = Description of Artificial Sequence: Synthetic oligonucleotide
  source 1..23: mol_type = other RNA
  modified_base 1: mod_base = OTHER; note = 2'-O-methyladenosine-3'-phosphorothioate
  modified_base 2: mod_base = OTHER; note = 2'-fluoroadenosine-3'-phosphorothioate
  modified_base 3: mod_base = OTHER; note = 2'-O-methyluridine-3'-phosphate
  modified_base 4: mod_base = OTHER; note = 2'-O-methylcytidine-3'-phosphate
  modified_base 5: mod_base = OTHER; note = 2'-O-methyladenosine-3'-phosphate
  modified_base 6: mod_base = OTHER; note = 2'-fluorocytidine-3'-phosphate
  modified_base 7: mod_base = OTHER; note = 2'-O-methyluridine-3'-phosphate
  modified_base 8: mod_base = OTHER; note = 2'-fluorouridine-3'-phosphate
  modified_base 9: mod_base = OTHER; note = 2'-fluorouridine-3'-phosphate
  modified_base 10: mod_base = OTHER; note = 2'-O-methylcytidine-3'-phosphate
  modified_base 11: mod_base = OTHER; note = 2'-O-methylcytidine-3'-phosphate
  modified_base 12: mod_base = OTHER; note = 2'-O-methylcytidine-3'-phosphate
  modified_base 13: mod_base = OTHER; note = 2'-O-methylguanosine-3'-phosphate
  modified_base 14: mod_base = OTHER; note = 2'-fluoroguanosine-3'-phosphate
  modified_base 15: mod_base = OTHER; note = 2'-O-methyladenosine-3'-phosphate
  modified_base 16: mod_base = OTHER; note = 2'-fluoroadenosine-3'-phosphate
  modified_base 17: mod_base = OTHER; note = 2'-O-methylcytidine-3'-phosphate
  modified_base 18: mod_base = OTHER; note = 2'-O-methyladenosine-3'-phosphate
  modified_base 19: mod_base = OTHER; note = 2'-O-methyluridine-3'-phosphate
  modified_base 20: mod_base = OTHER; note = 2'-O-methylcytidine-3'-phosphate
  modified_base 21: mod_base = OTHER; note = 2'-O-methylcytidine-3'-phosphorothioate
  modified_base 22: mod_base = OTHER; note = 2'-O-methyladenosine-3'-phosphorothioate
  modified_base 23: mod_base = OTHER; note = 2'-O-methyladenosine-3'-phosphate
aatcactttcccggaacatccaa

SEQ ID NO: 708 - RNA, 23 nt, synthetic construct
  misc_feature 1..23: note = Description of Artificial Sequence: Synthetic oligonucleotide
  source 1..23: mol_type = other RNA
  modified_base 1: mod_base = OTHER; note = 2'-O-methyladenosine-3'-phosphorothioate
  modified_base 2: mod_base = OTHER; note = 2'-fluoroadenosine-3'-phosphorothioate
  modified_base 3: mod_base = OTHER; note = 2'-O-methyluridine-3'-phosphate
  modified_base 4: mod_base = OTHER; note = 2'-O-methyladenosine-3'-phosphate
  modified_base 5: mod_base = OTHER; note = 2'-O-methyluridine-3'-phosphate
  modified_base 6: mod_base = OTHER; note = 2'-fluoroguanosine-3'-phosphate
  modified_base 7: mod_base = OTHER; note = 2'-O-methyluridine-3'-phosphate
  modified_base 8: mod_base = OTHER; note = 2'-fluorocytidine-3'-phosphate
  modified_base 9: mod_base = OTHER; note = 2'-fluoroadenosine-3'-phosphate
  modified_base 10: mod_base = OTHER; note = 2'-O-methylcytidine-3'-phosphate
  modified_base 11: mod_base = OTHER; note = 2'-O-methyluridine-3'-phosphate
  modified_base 12: mod_base = OTHER; note = 2'-O-methyladenosine-3'-phosphate
  modified_base 13: mod_base = OTHER; note = 2'-O-methylguanosine-3'-phosphate
  modified_base 14: mod_base = OTHER; note = 2'-fluoroadenosine-3'-phosphate
  modified_base 15: mod_base = OTHER; note = 2'-O-methylcytidine-3'-phosphate
  modified_base 16: mod_base = OTHER; note = 2'-fluorocytidine-3'-phosphate
  modified_base 17: mod_base = OTHER; note = 2'-O-methyladenosine-3'-phosphate
  modified_base 18: mod_base = OTHER; note = 2'-O-methyluridine-3'-phosphate
  modified_base 19: mod_base = OTHER; note = 2'-O-methyladenosine-3'-phosphate
  modified_base 20: mod_base = OTHER; note = 2'-O-methyluridine-3'-phosphate
  modified_base 21: mod_base = OTHER; note = 2'-O-methylcytidine-3'-phosphorothioate
  modified_base 22: mod_base = OTHER; note = 2'-O-methyluridine-3'-phosphorothioate
  modified_base 23: mod_base = OTHER; note = 2'-O-methyluridine-3'-phosphate
aatatgtcactagaccatatctt

SEQ ID NO: 709 - RNA, 23 nt, synthetic construct
  misc_feature 1..23: note = Description of Artificial Sequence: Synthetic oligonucleotide
  source 1..23: mol_type = other RNA
  modified_base 1: mod_base = OTHER; note = 2'-O-methyladenosine-3'-phosphorothioate
  modified_base 2: mod_base = OTHER; note = 2'-fluoroguanosine-3'-phosphorothioate
  modified_base 3: mod_base = OTHER; note = 2'-O-methyluridine-3'-phosphate
  modified_base 4: mod_base = OTHER; note = 2'-O-methyluridine-3'-phosphate
  modified_base 5: mod_base = OTHER; note = 2'-O-methyluridine-3'-phosphate
  modified_base 6: mod_base = OTHER; note = 2'-fluorouridine-3'-phosphate
  modified_base 7: mod_base = OTHER; note = 2'-O-methyladenosine-3'-phosphate
  modified_base 8: mod_base = OTHER; note = 2'-fluoroadenosine-3'-phosphate
  modified_base 9: mod_base = OTHER; note = 2'-fluorouridine-3'-phosphate
  modified_base 10: mod_base = OTHER; note = 2'-O-methyluridine-3'-phosphate
  modified_base 11: mod_base = OTHER; note = 2'-O-methylcytidine-3'-phosphate
  modified_base 12: mod_base = OTHER; note = 2'-O-methyladenosine-3'-phosphate
  modified_base 13: mod_base = OTHER; note = 2'-O-methyladenosine-3'-phosphate
  modified_base 14: mod_base = OTHER; note = 2'-fluorouridine-3'-phosphate
  modified_base 15: mod_base = OTHER; note = 2'-O-methylcytidine-3'-phosphate
  modified_base 16: mod_base = OTHER; note = 2'-fluorocytidine-3'-phosphate
  modified_base 17: mod_base = OTHER; note = 2'-O-methylcytidine-3'-phosphate
  modified_base 18: mod_base = OTHER; note = 2'-O-methyladenosine-3'-phosphate
  modified_base 19: mod_base = OTHER; note = 2'-O-methylcytidine-3'-phosphate
  modified_base 20: mod_base = OTHER; note = 2'-O-methylguanosine-3'-phosphate
  modified_base 21: mod_base = OTHER; note = 2'-O-methylcytidine-3'-phosphorothioate
  modified_base 22: mod_base = OTHER; note = 2'-O-methylcytidine-3'-phosphorothioate
  modified_base 23: mod_base = OTHER; note = 2'-O-methylcytidine-3'-phosphate
agttttaattcaatcccacgccc

SEQ ID NO: 710 - RNA, 23 nt, synthetic construct
  misc_feature 1..23: note = Description of Artificial Sequence: Synthetic oligonucleotide
  source 1..23: mol_type = other RNA
  modified_base 1: mod_base = OTHER; note = 2'-O-methyladenosine-3'-phosphorothioate
  modified_base 2: mod_base = OTHER; note = 2'-fluorouridine -3'-phosphorothioate
  modified_base 3: mod_base = OTHER; note = 2'-O-methyluridine-3'-phosphate
  modified_base 4: mod_base = OTHER; note = 2'-O-methyladenosine-3'-phosphate
  modified_base 5: mod_base = OTHER; note = 2'-O-methyladenosine-3'-phosphate
  modified_base 6: mod_base = OTHER; note = 2'-fluoroguanosine-3'-phosphate
  modified_base 7: mod_base = OTHER; note = 2'-O-methyluridine-3'-phosphate
  modified_base 8: mod_base = OTHER; note = 2'-fluorouridine-3'-phosphate
  modified_base 9: mod_base = OTHER; note = 2'-fluoroguanosine-3'-phosphate
  modified_base 10: mod_base = OTHER; note = 2'-O-methyladenosine-3'-phosphate
  modified_base 11: mod_base = OTHER; note = 2'-O-methylcytidine-3'-phosphate
  modified_base 12: mod_base = OTHER; note = 2'-O-methyluridine-3'-phosphate
  modified_base 13: mod_base = OTHER; note = 2'-O-methyladenosine-3'-phosphate
  modified_base 14: mod_base = OTHER; note = 2'-fluoroguanosine-3'-phosphate
  modified_base 15: mod_base = OTHER; note = 2'-O-methyladenosine-3'-phosphate
  modified_base 16: mod_base = OTHER; note = 2'-fluorocytidine-3'-phosphate
  modified_base 17: mod_base = OTHER; note = 2'-O-methyladenosine-3'-phosphate
  modified_base 18: mod_base = OTHER; note = 2'-O-methylcytidine-3'-phosphate
  modified_base 19: mod_base = OTHER; note = 2'-O-methyluridine-3'-phosphate
  modified_base 20: mod_base = OTHER; note = 2'-O-methyluridine-3'-phosphate
  modified_base 21: mod_base = OTHER; note = 2'-O-methyluridine-3'-phosphorothioate
  modified_base 22: mod_base = OTHER; note = 2'-O-methyluridine-3'-phosphorothioate
  modified_base 23: mod_base = OTHER; note = 2'-O-methyluridine-3'-phosphate
attaagttgactagacacttttt

SEQ ID NO: 711 - RNA, 23 nt, synthetic construct
  misc_feature 1..23: note = Description of Artificial Sequence: Synthetic oligonucleotide
  source 1..23: mol_type = other RNA
  modified_base 1: mod_base = OTHER; note = 2'-O-methyladenosine-3'-phosphorothioate
  modified_base 2: mod_base = OTHER; note = 2'-fluoroadenosine-3'-phosphorothioate
  modified_base 3: mod_base = OTHER; note = 2'-O-methyluridine-3'-phosphate
  modified_base 4: mod_base = OTHER; note = 2'-O-methyladenosine-3'-phosphate
  modified_base 5: mod_base = OTHER; note = 2'-O-methyladenosine-3'-phosphate
  modified_base 6: mod_base = OTHER; note = 2'-fluorouridine-3'-phosphate
  modified_base 7: mod_base = OTHER; note = 2'-O-methyluridine-3'-phosphate
  modified_base 8: mod_base = OTHER; note = 2'-fluoroguanosine-3'-phosphate
  modified_base 9: mod_base = OTHER; note = 2'-fluoroadenosine-3'-phosphate
  modified_base 10: mod_base = OTHER; note = 2'-O-methyluridine-3'-phosphate
  modified_base 11: mod_base = OTHER; note = 2'-O-methyluridine-3'-phosphate
  modified_base 12: mod_base = OTHER; note = 2'-O-methyluridine-3'-phosphate
  modified_base 13: mod_base = OTHER; note = 2'-O-methylcytidine-3'-phosphate
  modified_base 14: mod_base = OTHER; note = 2'-fluoroadenosine-3'-phosphate
  modified_base 15: mod_base = OTHER; note = 2'-O-methyluridine-3'-phosphate
  modified_base 16: mod_base = OTHER; note = 2'-fluorouridine-3'-phosphate
  modified_base 17: mod_base = OTHER; note = 2'-O-methylguanosine-3'-phosphate
  modified_base 18: mod_base = OTHER; note = 2'-O-methyladenosine-3'-phosphate
  modified_base 19: mod_base = OTHER; note = 2'-O-methylguanosine-3'-phosphate
  modified_base 20: mod_base = OTHER; note = 2'-O-methylcytidine-3'-phosphate
  modified_base 21: mod_base = OTHER; note = 2'-O-methyluridine-3'-phosphorothioate
  modified_base 22: mod_base = OTHER; note = 2'-O-methylguanosine-3'-phosphorothioate
  modified_base 23: mod_base = OTHER; note = 2'-O-methylcytidine-3'-phosphate
aataattgatttcattgagctgc

SEQ ID NO: 712 - RNA, 23 nt, synthetic construct
  misc_feature 1..23: note = Description of Artificial Sequence: Synthetic oligonucleotide
  source 1..23: mol_type = other RNA
  modified_base 1: mod_base = OTHER; note = 2'-O-methyladenosine-3'-phosphorothioate
  modified_base 2: mod_base = OTHER; note = 2'-fluorocytidine-3'-phosphorothioate
  modified_base 3: mod_base = OTHER; note = 2'-O-methyluridine-3'-phosphate
  modified_base 4: mod_base = OTHER; note = 2'-O-methyluridine-3'-phosphate
  modified_base 5: mod_base = OTHER; note = 2'-O-methylcytidine-3'-phosphate
  modified_base 6: mod_base = OTHER; note = 2'-fluoroadenosine-3'-phosphate
  modified_base 7: mod_base = OTHER; note = 2'-O-methyluridine-3'-phosphate
  modified_base 8: mod_base = OTHER; note = 2'-fluoroadenosine-3'-phosphate
  modified_base 9: mod_base = OTHER; note = 2'-fluoroadenosine-3'-phosphate
  modified_base 10: mod_base = OTHER; note = 2'-O-methyluridine-3'-phosphate
  modified_base 11: mod_base = OTHER; note = 2'-O-methyluridine-3'-phosphate
  modified_base 12: mod_base = OTHER; note = 2'-O-methylguanosine-3'-phosphate
  modified_base 13: mod_base = OTHER; note = 2'-O-methyladenosine-3'-phosphate
  modified_base 14: mod_base = OTHER; note = 2'-fluorouridine-3'-phosphate
  modified_base 15: mod_base = OTHER; note = 2'-O-methyluridine-3'-phosphate
  modified_base 16: mod_base = OTHER; note = 2'-fluorouridine-3'-phosphate
  modified_base 17: mod_base = OTHER; note = 2'-O-methylcytidine-3'-phosphate
  modified_base 18: mod_base = OTHER; note = 2'-O-methyladenosine-3'-phosphate
  modified_base 19: mod_base = OTHER; note = 2'-O-methyluridine-3'-phosphate
  modified_base 20: mod_base = OTHER; note = 2'-O-methyluridine-3'-phosphate
  modified_base 21: mod_base = OTHER; note = 2'-O-methylguanosine-3'-phosphorothioate
  modified_base 22: mod_base = OTHER; note = 2'-O-methyladenosine-3'-phosphorothioate
  modified_base 23: mod_base = OTHER; note = 2'-O-methylguanosine-3'-phosphate
acttcataattgatttcattgag

SEQ ID NO: 713 - RNA, 23 nt, synthetic construct
  misc_feature 1..23: note = Description of Artificial Sequence: Synthetic oligonucleotide
  source 1..23: mol_type = other RNA
  modified_base 1: mod_base = OTHER; note = 2'-O-methyladenosine-3'-phosphorothioate
  modified_base 2: mod_base = OTHER; note = 2'-fluorocytidine-3'-phosphorothioate
  modified_base 3: mod_base = OTHER; note = 2'-O-methyluridine-3'-phosphate
  modified_base 4: mod_base = OTHER; note = 2'-O-methylguanosine-3'-phosphate
  modified_base 5: mod_base = OTHER; note = 2'-O-methyluridine-3'-phosphate
  modified_base 6: mod_base = OTHER; note = 2'-fluorouridine-3'-phosphate
  modified_base 7: mod_base = OTHER; note = 2'-O-methyluridine-3'-phosphate
  modified_base 8: mod_base = OTHER; note = 2'-fluorouridine-3'-phosphate
  modified_base 9: mod_base = OTHER; note = 2'-fluoroadenosine-3'-phosphate
  modified_base 10: mod_base = OTHER; note = 2'-O-methyladenosine-3'-phosphate
  modified_base 11: mod_base = OTHER; note = 2'-O-methyluridine-3'-phosphate
  modified_base 12: mod_base = OTHER; note = 2'-O-methyluridine-3'-phosphate
  modified_base 13: mod_base = OTHER; note = 2'-O-methylcytidine-3'-phosphate
  modified_base 14: mod_base = OTHER; note = 2'-fluoroadenosine-3'-phosphate
  modified_base 15: mod_base = OTHER; note = 2'-O-methyladenosine-3'-phosphate
  modified_base 16: mod_base = OTHER; note = 2'-fluorouridine-3'-phosphate
  modified_base 17: mod_base = OTHER; note = 2'-O-methylcytidine-3'-phosphate
  modified_base 18: mod_base = OTHER; note = 2'-O-methylcytidine-3'-phosphate
  modified_base 19: mod_base = OTHER; note = 2'-O-methylcytidine-3'-phosphate
  modified_base 20: mod_base = OTHER; note = 2'-O-methyladenosine-3'-phosphate
  modified_base 21: mod_base = OTHER; note = 2'-O-methylcytidine-3'-phosphorothioate
  modified_base 22: mod_base = OTHER; note = 2'-O-methylguanosine-3'-phosphorothioate
  modified_base 23: mod_base = OTHER; note = 2'-O-methylcytidine-3'-phosphate
actgttttaattcaatcccacgc

SEQ ID NO: 714 - RNA, 23 nt, synthetic construct
  misc_feature 1..23: note = Description of Artificial Sequence: Synthetic oligonucleotide
  source 1..23: mol_type = other RNA
  modified_base 1: mod_base = OTHER; note = 2'-O-methyladenosine-3'-phosphorothioate
  modified_base 2: mod_base = OTHER; note = 2'-fluoroadenosine-3'-phosphorothioate
  modified_base 3: mod_base = OTHER; note = 2'-O-methyladenosine-3'-phosphate
  modified_base 4: mod_base = OTHER; note = 2'-O-methyladenosine-3'-phosphate
  modified_base 5: mod_base = OTHER; note = 2'-O-methyluridine-3'-phosphate
  modified_base 6: mod_base = OTHER; note = 2'-fluorouridine-3'-phosphate
  modified_base 7: mod_base = OTHER; note = 2'-O-methylcytidine-3'-phosphate
  modified_base 8: mod_base = OTHER; note = 2'-fluoroadenosine-3'-phosphate
  modified_base 9: mod_base = OTHER; note = 2'-fluoroguanosine-3'-phosphate
  modified_base 10: mod_base = OTHER; note = 2'-O-methylguanosine-3'-phosphate
  modified_base 11: mod_base = OTHER; note = 2'-O-methyladenosine-3'-phosphate
  modified_base 12: mod_base = OTHER; note = 2'-O-methyladenosine-3'-phosphate
  modified_base 13: mod_base = OTHER; note = 2'-O-methyluridine-3'-phosphate
  modified_base 14: mod_base = OTHER; note = 2'-fluorouridine-3'-phosphate
  modified_base 15: mod_base = OTHER; note = 2'-O-methylcytidine-3'-phosphate
  modified_base 16: mod_base = OTHER; note = 2'-fluorocytidine-3'-phosphate
  modified_base 17: mod_base = OTHER; note = 2'-O-methyluridine-3'-phosphate
  modified_base 18: mod_base = OTHER; note = 2'-O-methylguanosine-3'-phosphate
  modified_base 19: mod_base = OTHER; note = 2'-O-methylcytidine-3'-phosphate
  modified_base 20: mod_base = OTHER; note = 2'-O-methyluridine-3'-phosphate
  modified_base 21: mod_base = OTHER; note = 2'-O-methyluridine-3'-phosphorothioate
  modified_base 22: mod_base = OTHER; note = 2'-O-methylcytidine-3'-phosphorothioate
  modified_base 23: mod_base = OTHER; note = 2'-O-methyluridine-3'-phosphate
aaaattcaggaattcctgcttct

SEQ ID NO: 715 - RNA, 23 nt, synthetic construct
  misc_feature 1..23: note = Description of Artificial Sequence: Synthetic oligonucleotide
  source 1..23: mol_type = other RNA
  modified_base 1: mod_base = OTHER; note = 2'-O-methyladenosine-3'-phosphorothioate
  modified_base 2: mod_base = OTHER; note = 2'-fluoroguanosine-3'-phosphorothioate
  modified_base 3: mod_base = OTHER; note = 2'-O-methylcytidine-3'-phosphate
  modified_base 4: mod_base = OTHER; note = 2'-O-methyluridine-3'-phosphate
  modified_base 5: mod_base = OTHER; note = 2'-O-methylguanosine-3'-phosphate
  modified_base 6: mod_base = OTHER; note = 2'-fluorouridine-3'-phosphate
  modified_base 7: mod_base = OTHER; note = 2'-O-methyluridine-3'-phosphate
  modified_base 8: mod_base = OTHER; note = 2'-fluorouridine-3'-phosphate
  modified_base 9: mod_base = OTHER; note = 2'-fluorouridine-3'-phosphate
  modified_base 10: mod_base = OTHER; note = 2'-O-methyladenosine-3'-phosphate
  modified_base 11: mod_base = OTHER; note = 2'-O-methyladenosine-3'-phosphate
  modified_base 12: mod_base = OTHER; note = 2'-O-methyluridine-3'-phosphate
  modified_base 13: mod_base = OTHER; note = 2'-O-methyluridine-3'-phosphate
  modified_base 14: mod_base = OTHER; note = 2'-fluorocytidine-3'-phosphate
  modified_base 15: mod_base = OTHER; note = 2'-O-methyladenosine-3'-phosphate
  modified_base 16: mod_base = OTHER; note = 2'-fluoroadenosine-3'-phosphate
  modified_base 17: mod_base = OTHER; note = 2'-O-methyluridine-3'-phosphate
  modified_base 18: mod_base = OTHER; note = 2'-O-methylcytidine-3'-phosphate
  modified_base 19: mod_base = OTHER; note = 2'-O-methylcytidine-3'-phosphate
  modified_base 20: mod_base = OTHER; note = 2'-O-methylcytidine-3'-phosphate
  modified_base 21: mod_base = OTHER; note = 2'-O-methyladenosine-3'-phosphorothioate
  modified_base 22: mod_base = OTHER; note = 2'-O-methylcytidine-3'-phosphorothioate
  modified_base 23: mod_base = OTHER; note = 2'-O-methylguanosine-3'-phosphate
agctgttttaattcaatcccacg

SEQ ID NO: 716 - RNA, 23 nt, synthetic construct
  misc_feature 1..23: note = Description of Artificial Sequence: Synthetic oligonucleotide
  source 1..23: mol_type = other RNA
  modified_base 1: mod_base = OTHER; note = 2'-O-methyladenosine-3'-phosphorothioate
  modified_base 2: mod_base = OTHER; note = 2'-fluoroadenosine-3'-phosphorothioate
  modified_base 3: mod_base = OTHER; note = 2'-O-methyluridine-3'-phosphate
  modified_base 4: mod_base = OTHER; note = 2'-O-methylcytidine-3'-phosphate
  modified_base 5: mod_base = OTHER; note = 2'-O-methyladenosine-3'-phosphate
  modified_base 6: mod_base = OTHER; note = 2'-fluoroadenosine-3'-phosphate
  modified_base 7: mod_base = OTHER; note = 2'-O-methyluridine-3'-phosphate
  modified_base 8: mod_base = OTHER; note = 2'-fluoroguanosine-3'-phosphate
  modified_base 9: mod_base = OTHER; note = 2'-fluoroadenosine-3'-phosphate
  modified_base 10: mod_base = OTHER; note = 2'-O-methylcytidine-3'-phosphate
  modified_base 11: mod_base = OTHER; note = 2'-O-methyladenosine-3'-phosphate
  modified_base 12: mod_base = OTHER; note = 2'-O-methylguanosine-3'-phosphate
  modified_base 13: mod_base = OTHER; note = 2'-O-methyluridine-3'-phosphate
  modified_base 14: mod_base = OTHER; note = 2'-fluoroadenosine-3'-phosphate
  modified_base 15: mod_base = OTHER; note = 2'-O-methyladenosine-3'-phosphate
  modified_base 16: mod_base = OTHER; note = 2'-fluorouridine-3'-phosphate
  modified_base 17: mod_base = OTHER; note = 2'-O-methyluridine-3'-phosphate
  modified_base 18: mod_base = OTHER; note = 2'-O-methylguanosine-3'-phosphate
  modified_base 19: mod_base = OTHER; note = 2'-O-methylguanosine-3'-phosphate
  modified_base 20: mod_base = OTHER; note = 2'-O-methylguanosine-3'-phosphate
  modified_base 21: mod_base = OTHER; note = 2'-O-methyluridine-3'-phosphorothioate
  modified_base 22: mod_base = OTHER; note = 2'-O-methylcytidine-3'-phosphorothioate
  modified_base 23: mod_base = OTHER; note = 2'-O-methylcytidine-3'-phosphate
aatcaatgacagtaattgggtcc

SEQ ID NO: 717 - RNA, 23 nt, synthetic construct
  misc_feature 1..23: note = Description of Artificial Sequence: Synthetic oligonucleotide
  source 1..23: mol_type = other RNA
  modified_base 1: mod_base = OTHER; note = 2'-O-methyladenosine-3'-phosphorothioate
  modified_base 2: mod_base = OTHER; note = 2'-fluorocytidine-3'-phosphorothioate
  modified_base 3: mod_base = OTHER; note = 2'-O-methyluridine-3'-phosphate
  modified_base 4: mod_base = OTHER; note = 2'-O-methyluridine-3'-phosphate
  modified_base 5: mod_base = OTHER; note = 2'-O-methyluridine-3'-phosphate
  modified_base 6: mod_base = OTHER; note = 2'-fluoroguanosine-3'-phosphate
  modified_base 7: mod_base = OTHER; note = 2'-O-methyladenosine-3'-phosphate
  modified_base 8: mod_base = OTHER; note = 2'-fluorouridine-3'-phosphate
  modified_base 9: mod_base = OTHER; note = 2'-fluoroadenosine-3'-phosphate
  modified_base 10: mod_base = OTHER; note = 2'-O-methyluridine-3'-phosphate
  modified_base 11: mod_base = OTHER; note = 2'-O-methylcytidine-3'-phosphate
  modified_base 12: mod_base = OTHER; note = 2'-O-methylcytidine-3'-phosphate
  modified_base 13: mod_base = OTHER; note = 2'-O-methyluridine-3'-phosphate
  modified_base 14: mod_base = OTHER; note = 2'-fluoroguanosine-3'-phosphate
  modified_base 15: mod_base = OTHER; note = 2'-O-methyluridine-3'-phosphate
  modified_base 16: mod_base = OTHER; note = 2'-fluoroguanosine-3'-phosphate
  modified_base 17: mod_base = OTHER; note = 2'-O-methylcytidine-3'-phosphate
  modified_base 18: mod_base = OTHER; note = 2'-O-methyladenosine-3'-phosphate
  modified_base 19: mod_base = OTHER; note = 2'-O-methylguanosine-3'-phosphate
  modified_base 20: mod_base = OTHER; note = 2'-O-methylguanosine-3'-phosphate
  modified_base 21: mod_base = OTHER; note = 2'-O-methylguanosine-3'-phosphorothioate
  modified_base 22: mod_base = OTHER; note = 2'-O-methyladenosine-3'-phosphorothioate
  modified_base 23: mod_base = OTHER; note = 2'-O-methylguanosine-3'-phosphate
actttgatatcctgtgcagggag

SEQ ID NO: 718 - RNA, 23 nt, synthetic construct
  misc_feature 1..23: note = Description of Artificial Sequence: Synthetic oligonucleotide
  source 1..23: mol_type = other RNA
  modified_base 1: mod_base = OTHER; note = 2'-O-methyladenosine-3'-phosphorothioate
  modified_base 2: mod_base = OTHER; note = 2'-fluorouridine -3'-phosphorothioate
  modified_base 3: mod_base = OTHER; note = 2'-O-methylcytidine-3'-phosphate
  modified_base 4: mod_base = OTHER; note = 2'-O-methyladenosine-3'-phosphate
  modified_base 5: mod_base = OTHER; note = 2'-O-methyluridine-3'-phosphate
  modified_base 6: mod_base = OTHER; note = 2'-fluorocytidine-3'-phosphate
  modified_base 7: mod_base = OTHER; note = 2'-O-methyladenosine-3'-phosphate
  modified_base 8: mod_base = OTHER; note = 2'-fluoroadenosine-3'-phosphate
  modified_base 9: mod_base = OTHER; note = 2'-fluorouridine-3'-phosphate
  modified_base 10: mod_base = OTHER; note = 2'-O-methylguanosine-3'-phosphate
  modified_base 11: mod_base = OTHER; note = 2'-O-methyladenosine-3'-phosphate
  modified_base 12: mod_base = OTHER; note = 2'-O-methylcytidine-3'-phosphate
  modified_base 13: mod_base = OTHER; note = 2'-O-methyladenosine-3'-phosphate
  modified_base 14: mod_base = OTHER; note = 2'-fluoroguanosine-3'-phosphate
  modified_base 15: mod_base = OTHER; note = 2'-O-methyluridine-3'-phosphate
  modified_base 16: mod_base = OTHER; note = 2'-fluoroadenosine-3'-phosphate
  modified_base 17: mod_base = OTHER; note = 2'-O-methyladenosine-3'-phosphate
  modified_base 18: mod_base = OTHER; note = 2'-O-methyluridine-3'-phosphate
  modified_base 19: mod_base = OTHER; note = 2'-O-methyluridine-3'-phosphate
  modified_base 20: mod_base = OTHER; note = 2'-O-methylguanosine-3'-phosphate
  modified_base 21: mod_base = OTHER; note = 2'-O-methylguanosine-3'-phosphorothioate
  modified_base 22: mod_base = OTHER; note = 2'-O-methylguanosine-3'-phosphorothioate
  modified_base 23: mod_base = OTHER; note = 2'-O-methyluridine-3'-phosphate
atcatcaatgacagtaattgggt

SEQ ID NO: 719 - RNA, 23 nt, synthetic construct
  misc_feature 1..23: note = Description of Artificial Sequence: Synthetic oligonucleotide
  source 1..23: mol_type = other RNA
  modified_base 1: mod_base = OTHER; note = 2'-O-methyladenosine-3'-phosphorothioate
  modified_base 2: mod_base = OTHER; note = 2'-fluorouridine -3'-phosphorothioate
  modified_base 3: mod_base = OTHER; note = 2'-O-methylguanosine-3'-phosphate
  modified_base 4: mod_base = OTHER; note = 2'-O-methyluridine-3'-phosphate
  modified_base 5: mod_base = OTHER; note = 2'-O-methyluridine-3'-phosphate
  modified_base 6: mod_base = OTHER; note = 2'-fluorouridine-3'-phosphate
  modified_base 7: mod_base = OTHER; note = 2'-O-methyluridine-3'-phosphate
  modified_base 8: mod_base = OTHER; note = 2'-fluoroadenosine-3'-phosphate
  modified_base 9: mod_base = OTHER; note = 2'-fluoroadenosine-3'-phosphate
  modified_base 10: mod_base = OTHER; note = 2'-O-methyluridine-3'-phosphate
  modified_base 11: mod_base = OTHER; note = 2'-O-methyluridine-3'-phosphate
  modified_base 12: mod_base = OTHER; note = 2'-O-methylcytidine-3'-phosphate
  modified_base 13: mod_base = OTHER; note = 2'-O-methyladenosine-3'-phosphate
  modified_base 14: mod_base = OTHER; note = 2'-fluoroadenosine-3'-phosphate
  modified_base 15: mod_base = OTHER; note = 2'-O-methyluridine-3'-phosphate
  modified_base 16: mod_base = OTHER; note = 2'-fluorocytidine-3'-phosphate
  modified_base 17: mod_base = OTHER; note = 2'-O-methylcytidine-3'-phosphate
  modified_base 18: mod_base = OTHER; note = 2'-O-methylcytidine-3'-phosphate
  modified_base 19: mod_base = OTHER; note = 2'-O-methyladenosine-3'-phosphate
  modified_base 20: mod_base = OTHER; note = 2'-O-methylcytidine-3'-phosphate
  modified_base 21: mod_base = OTHER; note = 2'-O-methylguanosine-3'-phosphorothioate
  modified_base 22: mod_base = OTHER; note = 2'-O-methylcytidine-3'-phosphorothioate
  modified_base 23: mod_base = OTHER; note = 2'-O-methylcytidine-3'-phosphate
atgttttaattcaatcccacgcc

SEQ ID NO: 720 - RNA, 23 nt, synthetic construct
  misc_feature 1..23: note = Description of Artificial Sequence: Synthetic oligonucleotide
  source 1..23: mol_type = other RNA
  modified_base 1: mod_base = OTHER; note = 2'-O-methyladenosine-3'-phosphorothioate
  modified_base 2: mod_base = OTHER; note = 2'-fluorocytidine-3'-phosphorothioate
  modified_base 3: mod_base = OTHER; note = 2'-O-methyladenosine-3'-phosphate
  modified_base 4: mod_base = OTHER; note = 2'-O-methyluridine-3'-phosphate
  modified_base 5: mod_base = OTHER; note = 2'-O-methyladenosine-3'-phosphate
  modified_base 6: mod_base = OTHER; note = 2'-fluoroadenosine-3'-phosphate
  modified_base 7: mod_base = OTHER; note = 2'-O-methyladenosine-3'-phosphate
  modified_base 8: mod_base = OTHER; note = 2'-fluoroadenosine-3'-phosphate
  modified_base 9: mod_base = OTHER; note = 2'-fluorouridine-3'-phosphate
  modified_base 10: mod_base = OTHER; note = 2'-O-methyluridine-3'-phosphate
  modified_base 11: mod_base = OTHER; note = 2'-O-methylcytidine-3'-phosphate
  modified_base 12: mod_base = OTHER; note = 2'-O-methyladenosine-3'-phosphate
  modified_base 13: mod_base = OTHER; note = 2'-O-methylguanosine-3'-phosphate
  modified_base 14: mod_base = OTHER; note = 2'-fluoroguanosine-3'-phosphate
  modified_base 15: mod_base = OTHER; note = 2'-O-methyladenosine-3'-phosphate
  modified_base 16: mod_base = OTHER; note = 2'-fluoroadenosine-3'-phosphate
  modified_base 17: mod_base = OTHER; note = 2'-O-methyluridine-3'-phosphate
  modified_base 18: mod_base = OTHER; note = 2'-O-methyluridine-3'-phosphate
  modified_base 19: mod_base = OTHER; note = 2'-O-methylcytidine-3'-phosphate
  modified_base 20: mod_base = OTHER; note = 2'-O-methylcytidine-3'-phosphate
  modified_base 21: mod_base = OTHER; note = 2'-O-methyluridine-3'-phosphorothioate
  modified_base 22: mod_base = OTHER; note = 2'-O-methylguanosine-3'-phosphorothioate
  modified_base 23: mod_base = OTHER; note = 2'-O-methylcytidine-3'-phosphate
acataaaattcaggaattcctgc

SEQ ID NO: 721 - RNA, 23 nt, synthetic construct
  misc_feature 1..23: note = Description of Artificial Sequence: Synthetic oligonucleotide
  source 1..23: mol_type = other RNA
  modified_base 1: mod_base = OTHER; note = 2'-O-methyladenosine-3'-phosphorothioate
  modified_base 2: mod_base = OTHER; note = 2'-fluoroadenosine-3'-phosphorothioate
  modified_base 3: mod_base = OTHER; note = 2'-O-methylguanosine-3'-phosphate
  modified_base 4: mod_base = OTHER; note = 2'-O-methyluridine-3'-phosphate
  modified_base 5: mod_base = OTHER; note = 2'-O-methylcytidine-3'-phosphate
  modified_base 6: mod_base = OTHER; note = 2'-fluoroadenosine-3'-phosphate
  modified_base 7: mod_base = OTHER; note = 2'-O-methyluridine-3'-phosphate
  modified_base 8: mod_base = OTHER; note = 2'-fluoroadenosine-3'-phosphate
  modified_base 9: mod_base = OTHER; note = 2'-fluoroadenosine-3'-phosphate
  modified_base 10: mod_base = OTHER; note = 2'-O-methyladenosine-3'-phosphate
  modified_base 11: mod_base = OTHER; note = 2'-O-methyladenosine-3'-phosphate
  modified_base 12: mod_base = OTHER; note = 2'-O-methyluridine-3'-phosphate
  modified_base 13: mod_base = OTHER; note = 2'-O-methyluridine-3'-phosphate
  modified_base 14: mod_base = OTHER; note = 2'-fluorocytidine-3'-phosphate
  modified_base 15: mod_base = OTHER; note = 2'-O-methyladenosine-3'-phosphate
  modified_base 16: mod_base = OTHER; note = 2'-fluoroguanosine-3'-phosphate
  modified_base 17: mod_base = OTHER; note = 2'-O-methylguanosine-3'-phosphate
  modified_base 18: mod_base = OTHER; note = 2'-O-methyladenosine-3'-phosphate
  modified_base 19: mod_base = OTHER; note = 2'-O-methyladenosine-3'-phosphate
  modified_base 20: mod_base = OTHER; note = 2'-O-methyluridine-3'-phosphate
  modified_base 21: mod_base = OTHER; note = 2'-O-methyluridine-3'-phosphorothioate
  modified_base 22: mod_base = OTHER; note = 2'-O-methylcytidine-3'-phosphorothioate
  modified_base 23: mod_base = OTHER; note = 2'-O-methylcytidine-3'-phosphate
aagtcataaaattcaggaattcc

SEQ ID NO: 722 - RNA, 23 nt, synthetic construct
  misc_feature 1..23: note = Description of Artificial Sequence: Synthetic oligonucleotide
  source 1..23: mol_type = other RNA
  modified_base 1: mod_base = OTHER; note = 2'-O-methyladenosine-3'-phosphorothioate
  modified_base 2: mod_base = OTHER; note = 2'-fluorocytidine-3'-phosphorothioate
  modified_base 3: mod_base = OTHER; note = 2'-O-methyluridine-3'-phosphate
  modified_base 4: mod_base = OTHER; note = 2'-O-methylcytidine-3'-phosphate
  modified_base 5: mod_base = OTHER; note = 2'-O-methyladenosine-3'-phosphate
  modified_base 6: mod_base = OTHER; note = 2'-fluoroadenosine-3'-phosphate
  modified_base 7: mod_base = OTHER; note = 2'-O-methyluridine-3'-phosphate
  modified_base 8: mod_base = OTHER; note = 2'-fluorouridine-3'-phosphate
  modified_base 9: mod_base = OTHER; note = 2'-fluoroadenosine-3'-phosphate
  modified_base 10: mod_base = OTHER; note = 2'-O-methyladenosine-3'-phosphate
  modified_base 11: mod_base = OTHER; note = 2'-O-methylguanosine-3'-phosphate
  modified_base 12: mod_base = OTHER; note = 2'-O-methyluridine-3'-phosphate
  modified_base 13: mod_base = OTHER; note = 2'-O-methyluridine-3'-phosphate
  modified_base 14: mod_base = OTHER; note = 2'-fluoroguanosine-3'-phosphate
  modified_base 15: mod_base = OTHER; note = 2'-O-methyladenosine-3'-phosphate
  modified_base 16: mod_base = OTHER; note = 2'-fluorocytidine-3'-phosphate
  modified_base 17: mod_base = OTHER; note = 2'-O-methyluridine-3'-phosphate
  modified_base 18: mod_base = OTHER; note = 2'-O-methyladenosine-3'-phosphate
  modified_base 19: mod_base = OTHER; note = 2'-O-methylguanosine-3'-phosphate
  modified_base 20: mod_base = OTHER; note = 2'-O-methyladenosine-3'-phosphate
  modified_base 21: mod_base = OTHER; note = 2'-O-methylcytidine-3'-phosphorothioate
  modified_base 22: mod_base = OTHER; note = 2'-O-methyladenosine-3'-phosphorothioate
  modified_base 23: mod_base = OTHER; note = 2'-O-methylcytidine-3'-phosphate
actcaattaagttgactagacac

SEQ ID NO: 723 - RNA, 23 nt, synthetic construct
  misc_feature 1..23: note = Description of Artificial Sequence: Synthetic oligonucleotide
  source 1..23: mol_type = other RNA
  modified_base 1: mod_base = OTHER; note = 2'-O-methyladenosine-3'-phosphorothioate
  modified_base 2: mod_base = OTHER; note = 2'-fluorouridine -3'-phosphorothioate
  modified_base 3: mod_base = OTHER; note = 2'-O-methylcytidine-3'-phosphate
  modified_base 4: mod_base = OTHER; note = 2'-O-methyladenosine-3'-phosphate
  modified_base 5: mod_base = OTHER; note = 2'-O-methyluridine-3'-phosphate
  modified_base 6: mod_base = OTHER; note = 2'-fluoroadenosine-3'-phosphate
  modified_base 7: mod_base = OTHER; note = 2'-O-methyladenosine-3'-phosphate
  modified_base 8: mod_base = OTHER; note = 2'-fluoroadenosine-3'-phosphate
  modified_base 9: mod_base = OTHER; note = 2'-fluoroadenosine-3'-phosphate
  modified_base 10: mod_base = OTHER; note = 2'-O-methyluridine-3'-phosphate
  modified_base 11: mod_base = OTHER; note = 2'-O-methyluridine-3'-phosphate
  modified_base 12: mod_base = OTHER; note = 2'-O-methylcytidine-3'-phosphate
  modified_base 13: mod_base = OTHER; note = 2'-O-methyladenosine-3'-phosphate
  modified_base 14: mod_base = OTHER; note = 2'-fluoroguanosine-3'-phosphate
  modified_base 15: mod_base = OTHER; note = 2'-O-methylguanosine-3'-phosphate
  modified_base 16: mod_base = OTHER; note = 2'-fluoroadenosine-3'-phosphate
  modified_base 17: mod_base = OTHER; note = 2'-O-methyladenosine-3'-phosphate
  modified_base 18: mod_base = OTHER; note = 2'-O-methyluridine-3'-phosphate
  modified_base 19: mod_base = OTHER; note = 2'-O-methyluridine-3'-phosphate
  modified_base 20: mod_base = OTHER; note = 2'-O-methylcytidine-3'-phosphate
  modified_base 21: mod_base = OTHER; note = 2'-O-methylcytidine-3'-phosphorothioate
  modified_base 22: mod_base = OTHER; note = 2'-O-methyluridine-3'-phosphorothioate
  modified_base 23: mod_base = OTHER; note = 2'-O-methylguanosine-3'-phosphate
atcataaaattcaggaattcctg

SEQ ID NO: 724 - RNA, 23 nt, synthetic construct
  misc_feature 1..23: note = Description of Artificial Sequence: Synthetic oligonucleotide
  source 1..23: mol_type = other RNA
  modified_base 1: mod_base = OTHER; note = 2'-O-methyladenosine-3'-phosphorothioate
  modified_base 2: mod_base = OTHER; note = 2'-fluorocytidine-3'-phosphorothioate
  modified_base 3: mod_base = OTHER; note = 2'-O-methyladenosine-3'-phosphate
  modified_base 4: mod_base = OTHER; note = 2'-O-methyluridine-3'-phosphate
  modified_base 5: mod_base = OTHER; note = 2'-O-methyladenosine-3'-phosphate
  modified_base 6: mod_base = OTHER; note = 2'-fluorouridine-3'-phosphate
  modified_base 7: mod_base = OTHER; note = 2'-O-methylcytidine-3'-phosphate
  modified_base 8: mod_base = OTHER; note = 2'-fluorouridine-3'-phosphate
  modified_base 9: mod_base = OTHER; note = 2'-fluorouridine-3'-phosphate
  modified_base 10: mod_base = OTHER; note = 2'-O-methylguanosine-3'-phosphate
  modified_base 11: mod_base = OTHER; note = 2'-O-methylguanosine-3'-phosphate
  modified_base 12: mod_base = OTHER; note = 2'-O-methylcytidine-3'-phosphate
  modified_base 13: mod_base = OTHER; note = 2'-O-methyluridine-3'-phosphate
  modified_base 14: mod_base = OTHER; note = 2'-fluorouridine-3'-phosphate
  modified_base 15: mod_base = OTHER; note = 2'-O-methylcytidine-3'-phosphate
  modified_base 16: mod_base = OTHER; note = 2'-fluoroadenosine-3'-phosphate
  modified_base 17: mod_base = OTHER; note = 2'-O-methylcytidine-3'-phosphate
  modified_base 18: mod_base = OTHER; note = 2'-O-methyladenosine-3'-phosphate
  modified_base 19: mod_base = OTHER; note = 2'-O-methylcytidine-3'-phosphate
  modified_base 20: mod_base = OTHER; note = 2'-O-methylcytidine-3'-phosphate
  modified_base 21: mod_base = OTHER; note = 2'-O-methyladenosine-3'-phosphorothioate
  modified_base 22: mod_base = OTHER; note = 2'-O-methyluridine-3'-phosphorothioate
  modified_base 23: mod_base = OTHER; note = 2'-O-methyladenosine-3'-phosphate
acatatcttggcttcacaccata

SEQ ID NO: 725 - RNA, 23 nt, synthetic construct
  misc_feature 1..23: note = Description of Artificial Sequence: Synthetic oligonucleotide
  source 1..23: mol_type = other RNA
  modified_base 1: mod_base = OTHER; note = 2'-O-methyladenosine-3'-phosphorothioate
  modified_base 2: mod_base = OTHER; note = 2'-fluorouridine -3'-phosphorothioate
  modified_base 3: mod_base = OTHER; note = 2'-O-methyluridine-3'-phosphate
  modified_base 4: mod_base = OTHER; note = 2'-O-methylguanosine-3'-phosphate
  modified_base 5: mod_base = OTHER; note = 2'-O-methyladenosine-3'-phosphate
  modified_base 6: mod_base = OTHER; note = 2'-fluorouridine-3'-phosphate
  modified_base 7: mod_base = OTHER; note = 2'-O-methyladenosine-3'-phosphate
  modified_base 8: mod_base = OTHER; note = 2'-fluorouridine-3'-phosphate
  modified_base 9: mod_base = OTHER; note = 2'-fluorocytidine-3'-phosphate
  modified_base 10: mod_base = OTHER; note = 2'-O-methylcytidine-3'-phosphate
  modified_base 11: mod_base = OTHER; note = 2'-O-methyluridine-3'-phosphate
  modified_base 12: mod_base = OTHER; note = 2'-O-methylguanosine-3'-phosphate
  modified_base 13: mod_base = OTHER; note = 2'-O-methyluridine-3'-phosphate
  modified_base 14: mod_base = OTHER; note = 2'-fluoroguanosine-3'-phosphate
  modified_base 15: mod_base = OTHER; note = 2'-O-methylcytidine-3'-phosphate
  modified_base 16: mod_base = OTHER; note = 2'-fluoroadenosine-3'-phosphate
  modified_base 17: mod_base = OTHER; note = 2'-O-methylguanosine-3'-phosphate
  modified_base 18: mod_base = OTHER; note = 2'-O-methylguanosine-3'-phosphate
  modified_base 19: mod_base = OTHER; note = 2'-O-methylguanosine-3'-phosphate
  modified_base 20: mod_base = OTHER; note = 2'-O-methyladenosine-3'-phosphate
  modified_base 21: mod_base = OTHER; note = 2'-O-methylguanosine-3'-phosphorothioate
  modified_base 22: mod_base = OTHER; note = 2'-O-methylcytidine-3'-phosphorothioate
  modified_base 23: mod_base = OTHER; note = 2'-O-methyladenosine-3'-phosphate
attgatatcctgtgcagggagca

SEQ ID NO: 726 - RNA, 23 nt, synthetic construct
  misc_feature 1..23: note = Description of Artificial Sequence: Synthetic oligonucleotide
  source 1..23: mol_type = other RNA
  modified_base 1: mod_base = OTHER; note = 2'-O-methyladenosine-3'-phosphorothioate
  modified_base 2: mod_base = OTHER; note = 2'-fluoroadenosine-3'-phosphorothioate
  modified_base 3: mod_base = OTHER; note = 2'-O-methyluridine-3'-phosphate
  modified_base 4: mod_base = OTHER; note = 2'-O-methyladenosine-3'-phosphate
  modified_base 5: mod_base = OTHER; note = 2'-O-methyluridine-3'-phosphate
  modified_base 6: mod_base = OTHER; note = 2'-fluorocytidine-3'-phosphate
  modified_base 7: mod_base = OTHER; note = 2'-O-methyluridine-3'-phosphate
  modified_base 8: mod_base = OTHER; note = 2'-fluorouridine-3'-phosphate
  modified_base 9: mod_base = OTHER; note = 2'-fluoroguanosine-3'-phosphate
  modified_base 10: mod_base = OTHER; note = 2'-O-methylguanosine-3'-phosphate
  modified_base 11: mod_base = OTHER; note = 2'-O-methylcytidine-3'-phosphate
  modified_base 12: mod_base = OTHER; note = 2'-O-methyluridine-3'-phosphate
  modified_base 13: mod_base = OTHER; note = 2'-O-methyluridine-3'-phosphate
  modified_base 14: mod_base = OTHER; note = 2'-fluorocytidine-3'-phosphate
  modified_base 15: mod_base = OTHER; note = 2'-O-methyladenosine-3'-phosphate
  modified_base 16: mod_base = OTHER; note = 2'-fluorocytidine-3'-phosphate
  modified_base 17: mod_base = OTHER; note = 2'-O-methyladenosine-3'-phosphate
  modified_base 18: mod_base = OTHER; note = 2'-O-methylcytidine-3'-phosphate
  modified_base 19: mod_base = OTHER; note = 2'-O-methylcytidine-3'-phosphate
  modified_base 20: mod_base = OTHER; note = 2'-O-methyladenosine-3'-phosphate
  modified_base 21: mod_base = OTHER; note = 2'-O-methyluridine-3'-phosphorothioate
  modified_base 22: mod_base = OTHER; note = 2'-O-methyladenosine-3'-phosphorothioate
  modified_base 23: mod_base = OTHER; note = 2'-O-methyladenosine-3'-phosphate
aatatcttggcttcacaccataa

SEQ ID NO: 727 - RNA, 23 nt, synthetic construct
  misc_feature 1..23: note = Description of Artificial Sequence: Synthetic oligonucleotide
  source 1..23: mol_type = other RNA
  modified_base 1: mod_base = OTHER; note = 2'-O-methyladenosine-3'-phosphorothioate
  modified_base 2: mod_base = OTHER; note = 2'-fluorouridine -3'-phosphorothioate
  modified_base 3: mod_base = OTHER; note = 2'-O-methyluridine-3'-phosphate
  modified_base 4: mod_base = OTHER; note = 2'-O-methyluridine-3'-phosphate
  modified_base 5: mod_base = OTHER; note = 2'-O-methylguanosine-3'-phosphate
  modified_base 6: mod_base = OTHER; note = 2'-fluoroadenosine-3'-phosphate
  modified_base 7: mod_base = OTHER; note = 2'-O-methyluridine-3'-phosphate
  modified_base 8: mod_base = OTHER; note = 2'-fluoroadenosine-3'-phosphate
  modified_base 9: mod_base = OTHER; note = 2'-fluorouridine-3'-phosphate
  modified_base 10: mod_base = OTHER; note = 2'-O-methylcytidine-3'-phosphate
  modified_base 11: mod_base = OTHER; note = 2'-O-methylcytidine-3'-phosphate
  modified_base 12: mod_base = OTHER; note = 2'-O-methyluridine-3'-phosphate
  modified_base 13: mod_base = OTHER; note = 2'-O-methylguanosine-3'-phosphate
  modified_base 14: mod_base = OTHER; note = 2'-fluorouridine-3'-phosphate
  modified_base 15: mod_base = OTHER; note = 2'-O-methylguanosine-3'-phosphate
  modified_base 16: mod_base = OTHER; note = 2'-fluorocytidine-3'-phosphate
  modified_base 17: mod_base = OTHER; note = 2'-O-methyladenosine-3'-phosphate
  modified_base 18: mod_base = OTHER; note = 2'-O-methylguanosine-3'-phosphate
  modified_base 19: mod_base = OTHER; note = 2'-O-methylguanosine-3'-phosphate
  modified_base 20: mod_base = OTHER; note = 2'-O-methylguanosine-3'-phosphate
  modified_base 21: mod_base = OTHER; note = 2'-O-methyladenosine-3'-phosphorothioate
  modified_base 22: mod_base = OTHER; note = 2'-O-methylguanosine-3'-phosphorothioate
  modified_base 23: mod_base = OTHER; note = 2'-O-methylcytidine-3'-phosphate
atttgatatcctgtgcagggagc

SEQ ID NO: 728 - RNA, 23 nt, synthetic construct
  misc_feature 1..23: note = Description of Artificial Sequence: Synthetic oligonucleotide
  source 1..23: mol_type = other RNA
  modified_base 1: mod_base = OTHER; note = 2'-O-methyladenosine-3'-phosphorothioate
  modified_base 2: mod_base = OTHER; note = 2'-fluorouridine -3'-phosphorothioate
  modified_base 3: mod_base = OTHER; note = 2'-O-methylcytidine-3'-phosphate
  modified_base 4: mod_base = OTHER; note = 2'-O-methyluridine-3'-phosphate
  modified_base 5: mod_base = OTHER; note = 2'-O-methyluridine-3'-phosphate
  modified_base 6: mod_base = OTHER; note = 2'-fluorocytidine-3'-phosphate
  modified_base 7: mod_base = OTHER; note = 2'-O-methyladenosine-3'-phosphate
  modified_base 8: mod_base = OTHER; note = 2'-fluorouridine-3'-phosphate
  modified_base 9: mod_base = OTHER; note = 2'-fluoroadenosine-3'-phosphate
  modified_base 10: mod_base = OTHER; note = 2'-O-methyladenosine-3'-phosphate
  modified_base 11: mod_base = OTHER; note = 2'-O-methyluridine-3'-phosphate
  modified_base 12: mod_base = OTHER; note = 2'-O-methyluridine-3'-phosphate
  modified_base 13: mod_base = OTHER; note = 2'-O-methylguanosine-3'-phosphate
  modified_base 14: mod_base = OTHER; note = 2'-fluoroadenosine-3'-phosphate
  modified_base 15: mod_base = OTHER; note = 2'-O-methyluridine-3'-phosphate
  modified_base 16: mod_base = OTHER; note = 2'-fluorouridine-3'-phosphate
  modified_base 17: mod_base = OTHER; note = 2'-O-methyluridine-3'-phosphate
  modified_base 18: mod_base = OTHER; note = 2'-O-methylcytidine-3'-phosphate
  modified_base 19: mod_base = OTHER; note = 2'-O-methyladenosine-3'-phosphate
  modified_base 20: mod_base = OTHER; note = 2'-O-methyluridine-3'-phosphate
  modified_base 21: mod_base = OTHER; note = 2'-O-methyluridine-3'-phosphorothioate
  modified_base 22: mod_base = OTHER; note = 2'-O-methylguanosine-3'-phosphorothioate
  modified_base 23: mod_base = OTHER; note = 2'-O-methyladenosine-3'-phosphate
atcttcataattgatttcattga

SEQ ID NO: 729 - RNA, 23 nt, synthetic construct
  misc_feature 1..23: note = Description of Artificial Sequence: Synthetic oligonucleotide
  source 1..23: mol_type = other RNA
  modified_base 1: mod_base = OTHER; note = 2'-O-methyladenosine-3'-phosphorothioate
  modified_base 2: mod_base = OTHER; note = 2'-fluoroadenosine-3'-phosphorothioate
  modified_base 3: mod_base = OTHER; note = 2'-O-methyladenosine-3'-phosphate
  modified_base 4: mod_base = OTHER; note = 2'-O-methyladenosine-3'-phosphate
  modified_base 5: mod_base = OTHER; note = 2'-O-methylcytidine-3'-phosphate
  modified_base 6: mod_base = OTHER; note = 2'-fluoroadenosine-3'-phosphate
  modified_base 7: mod_base = OTHER; note = 2'-O-methylcytidine-3'-phosphate
  modified_base 8: mod_base = OTHER; note = 2'-fluoroadenosine-3'-phosphate
  modified_base 9: mod_base = OTHER; note = 2'-fluorouridine-3'-phosphate
  modified_base 10: mod_base = OTHER; note = 2'-O-methyladenosine-3'-phosphate
  modified_base 11: mod_base = OTHER; note = 2'-O-methylguanosine-3'-phosphate
  modified_base 12: mod_base = OTHER; note = 2'-O-methyladenosine-3'-phosphate
  modified_base 13: mod_base = OTHER; note = 2'-O-methylcytidine-3'-phosphate
  modified_base 14: mod_base = OTHER; note = 2'-fluoroadenosine-3'-phosphate
  modified_base 15: mod_base = OTHER; note = 2'-O-methyluridine-3'-phosphate
  modified_base 16: mod_base = OTHER; note = 2'-fluorocytidine-3'-phosphate
  modified_base 17: mod_base = OTHER; note = 2'-O-methylcytidine-3'-phosphate
  modified_base 18: mod_base = OTHER; note = 2'-O-methyladenosine-3'-phosphate
  modified_base 19: mod_base = OTHER; note = 2'-O-methylguanosine-3'-phosphate
  modified_base 20: mod_base = OTHER; note = 2'-O-methyladenosine-3'-phosphate
  modified_base 21: mod_base = OTHER; note = 2'-O-methyluridine-3'-phosphorothioate
  modified_base 22: mod_base = OTHER; note = 2'-O-methyladenosine-3'-phosphorothioate
  modified_base 23: mod_base = OTHER; note = 2'-O-methyladenosine-3'-phosphate
aaaacacatagacatccagataa

SEQ ID NO: 730 - RNA, 23 nt, synthetic construct
  misc_feature 1..23: note = Description of Artificial Sequence: Synthetic oligonucleotide
  source 1..23: mol_type = other RNA
  modified_base 1: mod_base = OTHER; note = 2'-O-methyladenosine-3'-phosphorothioate
  modified_base 2: mod_base = OTHER; note = 2'-fluoroadenosine-3'-phosphorothioate
  modified_base 3: mod_base = OTHER; note = 2'-O-methyluridine-3'-phosphate
  modified_base 4: mod_base = OTHER; note = 2'-O-methyluridine-3'-phosphate
  modified_base 5: mod_base = OTHER; note = 2'-O-methylguanosine-3'-phosphate
  modified_base 6: mod_base = OTHER; note = 2'-fluoroadenosine-3'-phosphate
  modified_base 7: mod_base = OTHER; note = 2'-O-methyluridine-3'-phosphate
  modified_base 8: mod_base = OTHER; note = 2'-fluoroguanosine-3'-phosphate
  modified_base 9: mod_base = OTHER; note = 2'-fluorouridine-3'-phosphate
  modified_base 10: mod_base = OTHER; note = 2'-O-methyluridine-3'-phosphate
  modified_base 11: mod_base = OTHER; note = 2'-O-methylcytidine-3'-phosphate
  modified_base 12: mod_base = OTHER; note = 2'-O-methyladenosine-3'-phosphate
  modified_base 13: mod_base = OTHER; note = 2'-O-methylcytidine-3'-phosphate
  modified_base 14: mod_base = OTHER; note = 2'-fluorouridine-3'-phosphate
  modified_base 15: mod_base = OTHER; note = 2'-O-methyluridine-3'-phosphate
  modified_base 16: mod_base = OTHER; note = 2'-fluoroguanosine-3'-phosphate
  modified_base 17: mod_base = OTHER; note = 2'-O-methylguanosine-3'-phosphate
  modified_base 18: mod_base = OTHER; note = 2'-O-methyluridine-3'-phosphate
  modified_base 19: mod_base = OTHER; note = 2'-O-methyluridine-3'-phosphate
  modified_base 20: mod_base = OTHER; note = 2'-O-methylcytidine-3'-phosphate
  modified_base 21: mod_base = OTHER; note = 2'-O-methyladenosine-3'-phosphorothioate
  modified_base 22: mod_base = OTHER; note = 2'-O-methylcytidine-3'-phosphorothioate
  modified_base 23: mod_base = OTHER; note = 2'-O-methylcytidine-3'-phosphate
aattgatgttcacttggttcacc

SEQ ID NO: 731 - RNA, 23 nt, synthetic construct
  misc_feature 1..23: note = Description of Artificial Sequence: Synthetic oligonucleotide
  source 1..23: mol_type = other RNA
  modified_base 1: mod_base = OTHER; note = 2'-O-methyladenosine-3'-phosphorothioate
  modified_base 2: mod_base = OTHER; note = 2'-fluoroadenosine-3'-phosphorothioate
  modified_base 3: mod_base = OTHER; note = 2'-O-methyluridine-3'-phosphate
  modified_base 4: mod_base = OTHER; note = 2'-O-methyladenosine-3'-phosphate
  modified_base 5: mod_base = OTHER; note = 2'-O-methyladenosine-3'-phosphate
  modified_base 6: mod_base = OTHER; note = 2'-fluoroadenosine-3'-phosphate
  modified_base 7: mod_base = OTHER; note = 2'-O-methyladenosine-3'-phosphate
  modified_base 8: mod_base = OTHER; note = 2'-fluorouridine-3'-phosphate
  modified_base 9: mod_base = OTHER; note = 2'-fluorouridine-3'-phosphate
  modified_base 10: mod_base = OTHER; note = 2'-O-methylcytidine-3'-phosphate
  modified_base 11: mod_base = OTHER; note = 2'-O-methyladenosine-3'-phosphate
  modified_base 12: mod_base = OTHER; note = 2'-O-methylguanosine-3'-phosphate
  modified_base 13: mod_base = OTHER; note = 2'-O-methylguanosine-3'-phosphate
  modified_base 14: mod_base = OTHER; note = 2'-fluoroadenosine-3'-phosphate
  modified_base 15: mod_base = OTHER; note = 2'-O-methyladenosine-3'-phosphate
  modified_base 16: mod_base = OTHER; note = 2'-fluorouridine-3'-phosphate
  modified_base 17: mod_base = OTHER; note = 2'-O-methyluridine-3'-phosphate
  modified_base 18: mod_base = OTHER; note = 2'-O-methylcytidine-3'-phosphate
  modified_base 19: mod_base = OTHER; note = 2'-O-methylcytidine-3'-phosphate
  modified_base 20: mod_base = OTHER; note = 2'-O-methyluridine-3'-phosphate
  modified_base 21: mod_base = OTHER; note = 2'-O-methylguanosine-3'-phosphorothioate
  modified_base 22: mod_base = OTHER; note = 2'-O-methylcytidine-3'-phosphorothioate
  modified_base 23: mod_base = OTHER; note = 2'-O-methyluridine-3'-phosphate
aataaaattcaggaattcctgct

SEQ ID NO: 732 - RNA, 23 nt, synthetic construct
  misc_feature 1..23: note = Description of Artificial Sequence: Synthetic oligonucleotide
  source 1..23: mol_type = other RNA
  modified_base 1: mod_base = OTHER; note = 2'-O-methyladenosine-3'-phosphorothioate
  modified_base 2: mod_base = OTHER; note = 2'-fluorouridine -3'-phosphorothioate
  modified_base 3: mod_base = OTHER; note = 2'-O-methyluridine-3'-phosphate
  modified_base 4: mod_base = OTHER; note = 2'-O-methylguanosine-3'-phosphate
  modified_base 5: mod_base = OTHER; note = 2'-O-methyladenosine-3'-phosphate
  modified_base 6: mod_base = OTHER; note = 2'-fluorouridine-3'-phosphate
  modified_base 7: mod_base = OTHER; note = 2'-O-methylguanosine-3'-phosphate
  modified_base 8: mod_base = OTHER; note = 2'-fluorouridine-3'-phosphate
  modified_base 9: mod_base = OTHER; note = 2'-fluorouridine-3'-phosphate
  modified_base 10: mod_base = OTHER; note = 2'-O-methylcytidine-3'-phosphate
  modified_base 11: mod_base = OTHER; note = 2'-O-methyladenosine-3'-phosphate
  modified_base 12: mod_base = OTHER; note = 2'-O-methylcytidine-3'-phosphate
  modified_base 13: mod_base = OTHER; note = 2'-O-methyluridine-3'-phosphate
  modified_base 14: mod_base = OTHER; note = 2'-fluorouridine-3'-phosphate
  modified_base 15: mod_base = OTHER; note = 2'-O-methylguanosine-3'-phosphate
  modified_base 16: mod_base = OTHER; note = 2'-fluoroguanosine-3'-phosphate
  modified_base 17: mod_base = OTHER; note = 2'-O-methyluridine-3'-phosphate
  modified_base 18: mod_base = OTHER; note = 2'-O-methyluridine-3'-phosphate
  modified_base 19: mod_base = OTHER; note = 2'-O-methylcytidine-3'-phosphate
  modified_base 20: mod_base = OTHER; note = 2'-O-methyladenosine-3'-phosphate
  modified_base 21: mod_base = OTHER; note = 2'-O-methylcytidine-3'-phosphorothioate
  modified_base 22: mod_base = OTHER; note = 2'-O-methylcytidine-3'-phosphorothioate
  modified_base 23: mod_base = OTHER; note = 2'-O-methyladenosine-3'-phosphate
attgatgttcacttggttcacca

SEQ ID NO: 733 - RNA, 23 nt, unidentified
  misc_feature 1..23: note = Description of Unknown: Target sequence
  source 1..23: mol_type = unassigned RNA
cctgccaagactccttcatgtac

SEQ ID NO: 734 - RNA, 23 nt, unidentified
  misc_feature 1..23: note = Description of Unknown: Target sequence
  source 1..23: mol_type = unassigned RNA
acaagagaagtcgtttcattcaa

SEQ ID NO: 735 - RNA, 23 nt, unidentified
  misc_feature 1..23: note = Description of Unknown: Target sequence
  source 1..23: mol_type = unassigned RNA
caagagaagtcgtttcattcaag

SEQ ID NO: 736 - RNA, 23 nt, unidentified
  misc_feature 1..23: note = Description of Unknown: Target sequence
  source 1..23: mol_type = unassigned RNA
attatgaagaccacaagttgaag

SEQ ID NO: 737 - RNA, 23 nt, unidentified
  misc_feature 1..23: note = Description of Unknown: Target sequence
  source 1..23: mol_type = unassigned RNA
ctcggaaggaggtctacatcaag

SEQ ID NO: 738 - RNA, 23 nt, unidentified
  misc_feature 1..23: note = Description of Unknown: Target sequence
  source 1..23: mol_type = unassigned RNA
tgatcaagctcaagaataagctg

SEQ ID NO: 739 - RNA, 23 nt, unidentified
  misc_feature 1..23: note = Description of Unknown: Target sequence
  source 1..23: mol_type = unassigned RNA
cacaagagaagtcgtttcattca

SEQ ID NO: 740 - RNA, 23 nt, unidentified
  misc_feature 1..23: note = Description of Unknown: Target sequence
  source 1..23: mol_type = unassigned RNA
ggctgtggtgtctgagtactttg

SEQ ID NO: 741 - RNA, 23 nt, unidentified
  misc_feature 1..23: note = Description of Unknown: Target sequence
  source 1..23: mol_type = unassigned RNA
caatgagcaacatgtgttcaaag

SEQ ID NO: 742 - RNA, 23 nt, unidentified
  misc_feature 1..23: note = Description of Unknown: Target sequence
  source 1..23: mol_type = unassigned RNA
tcacaagagaagtcgtttcattc

SEQ ID NO: 743 - RNA, 23 nt, unidentified
  misc_feature 1..23: note = Description of Unknown: Target sequence
  source 1..23: mol_type = unassigned RNA
ttcaaagtcaaggatatggaaaa

SEQ ID NO: 744 - RNA, 23 nt, unidentified
  misc_feature 1..23: note = Description of Unknown: Target sequence
  source 1..23: mol_type = unassigned RNA
tgtggtgtctgagtactttgtgc

SEQ ID NO: 745 - RNA, 23 nt, unidentified
  misc_feature 1..23: note = Description of Unknown: Target sequence
  source 1..23: mol_type = unassigned RNA
agagaagtcgtttcattcaagtt

SEQ ID NO: 746 - RNA, 23 nt, unidentified
  misc_feature 1..23: note = Description of Unknown: Target sequence
  source 1..23: mol_type = unassigned RNA
tgttcaaagtcaaggatatggaa

SEQ ID NO: 747 - RNA, 23 nt, unidentified
  misc_feature 1..23: note = Description of Unknown: Target sequence
  source 1..23: mol_type = unassigned RNA
gttcaaagtcaaggatatggaaa

SEQ ID NO: 748 - RNA, 23 nt, unidentified
  misc_feature 1..23: note = Description of Unknown: Target sequence
  source 1..23: mol_type = unassigned RNA
gaaggaggtctacatcaagaatg

SEQ ID NO: 749 - RNA, 23 nt, unidentified
  misc_feature 1..23: note = Description of Unknown: Target sequence
  source 1..23: mol_type = unassigned RNA
agcaacatgtgttcaaagtcaag

SEQ ID NO: 750 - RNA, 23 nt, unidentified
  misc_feature 1..23: note = Description of Unknown: Target sequence
  source 1..23: mol_type = unassigned RNA
agactatcaggcccatttgtctc

SEQ ID NO: 751 - RNA, 23 nt, unidentified
  misc_feature 1..23: note = Description of Unknown: Target sequence
  source 1..23: mol_type = unassigned RNA
atgagcaacatgtgttcaaagtc

SEQ ID NO: 752 - RNA, 23 nt, unidentified
  misc_feature 1..23: note = Description of Unknown: Target sequence
  source 1..23: mol_type = unassigned RNA
ggaggattatctggatgtctatg

SEQ ID NO: 753 - RNA, 23 nt, unidentified
  misc_feature 1..23: note = Description of Unknown: Target sequence
  source 1..23: mol_type = unassigned RNA
atgtgttcaaagtcaaggatatg

SEQ ID NO: 754 - RNA, 23 nt, unidentified
  misc_feature 1..23: note = Description of Unknown: Target sequence
  source 1..23: mol_type = unassigned RNA
ggaaggaggtctacatcaagaat

SEQ ID NO: 755 - RNA, 23 nt, unidentified
  misc_feature 1..23: note = Description of Unknown: Target sequence
  source 1..23: mol_type = unassigned RNA
cttcaggctccatgaacatctac

SEQ ID NO: 756 - RNA, 23 nt, unidentified
  misc_feature 1..23: note = Description of Unknown: Target sequence
  source 1..23: mol_type = unassigned RNA
tagtggatgtctgcaaaaaccag

SEQ ID NO: 757 - RNA, 23 nt, unidentified
  misc_feature 1..23: note = Description of Unknown: Target sequence
  source 1..23: mol_type = unassigned RNA
ctgtgagagagatgctcaatatg

SEQ ID NO: 758 - RNA, 23 nt, unidentified
  misc_feature 1..23: note = Description of Unknown: Target sequence
  source 1..23: mol_type = unassigned RNA
caatcgcacctgccaagtgaatg

SEQ ID NO: 759 - RNA, 23 nt, unidentified
  misc_feature 1..23: note = Description of Unknown: Target sequence
  source 1..23: mol_type = unassigned RNA
cttcacaggagccaaaaagtgtc

SEQ ID NO: 760 - RNA, 23 nt, unidentified
  misc_feature 1..23: note = Description of Unknown: Target sequence
  source 1..23: mol_type = unassigned RNA
caaaaacccaagggaggattatc

SEQ ID NO: 761 - RNA, 23 nt, unidentified
  misc_feature 1..23: note = Description of Unknown: Target sequence
  source 1..23: mol_type = unassigned RNA
caaaaagtgtctagtcaacttaa

SEQ ID NO: 762 - RNA, 23 nt, unidentified
  misc_feature 1..23: note = Description of Unknown: Target sequence
  source 1..23: mol_type = unassigned RNA
agcagctcaatgaaatcaattat

SEQ ID NO: 763 - RNA, 23 nt, unidentified
  misc_feature 1..23: note = Description of Unknown: Target sequence
  source 1..23: mol_type = unassigned RNA
attatctggatgtctatgtgttt

SEQ ID NO: 764 - RNA, 23 nt, unidentified
  misc_feature 1..23: note = Description of Unknown: Target sequence
  source 1..23: mol_type = unassigned RNA
ggggcgtgggattgaattaaaac

SEQ ID NO: 765 - RNA, 23 nt, unidentified
  misc_feature 1..23: note = Description of Unknown: Target sequence
  source 1..23: mol_type = unassigned RNA
tgtgagagagatgctcaatatgc

SEQ ID NO: 766 - RNA, 23 nt, unidentified
  misc_feature 1..23: note = Description of Unknown: Target sequence
  source 1..23: mol_type = unassigned RNA
ctgtggtgtctgagtactttgtg

SEQ ID NO: 767 - RNA, 23 nt, unidentified
  misc_feature 1..23: note = Description of Unknown: Target sequence
  source 1..23: mol_type = unassigned RNA
aagcagctcaatgaaatcaatta

SEQ ID NO: 768 - RNA, 23 nt, unidentified
  misc_feature 1..23: note = Description of Unknown: Target sequence
  source 1..23: mol_type = unassigned RNA
cccggtctccctactacaatgtg

SEQ ID NO: 769 - RNA, 23 nt, unidentified
  misc_feature 1..23: note = Description of Unknown: Target sequence
  source 1..23: mol_type = unassigned RNA
gtgggattgaattaaaacagctg

SEQ ID NO: 770 - RNA, 23 nt, unidentified
  misc_feature 1..23: note = Description of Unknown: Target sequence
  source 1..23: mol_type = unassigned RNA
aaaacccaagggaggattatctg

SEQ ID NO: 771 - RNA, 23 nt, unidentified
  misc_feature 1..23: note = Description of Unknown: Target sequence
  source 1..23: mol_type = unassigned RNA
atgtgagtgatgagatctctttc

SEQ ID NO: 772 - RNA, 23 nt, unidentified
  misc_feature 1..23: note = Description of Unknown: Target sequence
  source 1..23: mol_type = unassigned RNA
caacatgtgttcaaagtcaagga

SEQ ID NO: 773 - RNA, 23 nt, unidentified
  misc_feature 1..23: note = Description of Unknown: Target sequence
  source 1..23: mol_type = unassigned RNA
aaagtgtctagtcaacttaattg

SEQ ID NO: 774 - RNA, 23 nt, unidentified
  misc_feature 1..23: note = Description of Unknown: Target sequence
  source 1..23: mol_type = unassigned RNA
aggggcgtgggattgaattaaaa

SEQ ID NO: 775 - RNA, 23 nt, unidentified
  misc_feature 1..23: note = Description of Unknown: Target sequence
  source 1..23: mol_type = unassigned RNA
accaagtgaacatcaatgctttg

SEQ ID NO: 776 - RNA, 23 nt, unidentified
  misc_feature 1..23: note = Description of Unknown: Target sequence
  source 1..23: mol_type = unassigned RNA
gaattcctgaattttatgactat

SEQ ID NO: 777 - RNA, 23 nt, unidentified
  misc_feature 1..23: note = Description of Unknown: Target sequence
  source 1..23: mol_type = unassigned RNA
agctcaatgaaatcaattatgaa

SEQ ID NO: 778 - RNA, 23 nt, unidentified
  misc_feature 1..23: note = Description of Unknown: Target sequence
  source 1..23: mol_type = unassigned RNA
ttggatgttccgggaaagtgatg

SEQ ID NO: 779 - RNA, 23 nt, unidentified
  misc_feature 1..23: note = Description of Unknown: Target sequence
  source 1..23: mol_type = unassigned RNA
aagatatggtctagtgacatatg

SEQ ID NO: 780 - RNA, 23 nt, unidentified
  misc_feature 1..23: note = Description of Unknown: Target sequence
  source 1..23: mol_type = unassigned RNA
gggcgtgggattgaattaaaaca

SEQ ID NO: 781 - RNA, 23 nt, unidentified
  misc_feature 1..23: note = Description of Unknown: Target sequence
  source 1..23: mol_type = unassigned RNA
aaaaagtgtctagtcaacttaat

SEQ ID NO: 782 - RNA, 23 nt, unidentified
  misc_feature 1..23: note = Description of Unknown: Target sequence
  source 1..23: mol_type = unassigned RNA
gcagctcaatgaaatcaattatg

SEQ ID NO: 783 - RNA, 23 nt, unidentified
  misc_feature 1..23: note = Description of Unknown: Target sequence
  source 1..23: mol_type = unassigned RNA
ctcaatgaaatcaattatgaaga

SEQ ID NO: 784 - RNA, 23 nt, unidentified
  misc_feature 1..23: note = Description of Unknown: Target sequence
  source 1..23: mol_type = unassigned RNA
gcgtgggattgaattaaaacagc

SEQ ID NO: 785 - RNA, 23 nt, unidentified
  misc_feature 1..23: note = Description of Unknown: Target sequence
  source 1..23: mol_type = unassigned RNA
agaagcaggaattcctgaatttt

SEQ ID NO: 786 - RNA, 23 nt, unidentified
  misc_feature 1..23: note = Description of Unknown: Target sequence
  source 1..23: mol_type = unassigned RNA
cgtgggattgaattaaaacagct

SEQ ID NO: 787 - RNA, 23 nt, unidentified
  misc_feature 1..23: note = Description of Unknown: Target sequence
  source 1..23: mol_type = unassigned RNA
ggacccaattactgtcattgatg

SEQ ID NO: 788 - RNA, 23 nt, unidentified
  misc_feature 1..23: note = Description of Unknown: Target sequence
  source 1..23: mol_type = unassigned RNA
ctccctgcacaggatatcaaagc

SEQ ID NO: 789 - RNA, 23 nt, unidentified
  misc_feature 1..23: note = Description of Unknown: Target sequence
  source 1..23: mol_type = unassigned RNA
acccaattactgtcattgatgag

SEQ ID NO: 790 - RNA, 23 nt, unidentified
  misc_feature 1..23: note = Description of Unknown: Target sequence
  source 1..23: mol_type = unassigned RNA
ggcgtgggattgaattaaaacag

SEQ ID NO: 791 - RNA, 23 nt, unidentified
  misc_feature 1..23: note = Description of Unknown: Target sequence
  source 1..23: mol_type = unassigned RNA
gcaggaattcctgaattttatga

SEQ ID NO: 792 - RNA, 23 nt, unidentified
  misc_feature 1..23: note = Description of Unknown: Target sequence
  source 1..23: mol_type = unassigned RNA
ggaattcctgaattttatgacta

SEQ ID NO: 793 - RNA, 23 nt, unidentified
  misc_feature 1..23: note = Description of Unknown: Target sequence
  source 1..23: mol_type = unassigned RNA
gtgtctagtcaacttaattgaga

SEQ ID NO: 794 - RNA, 23 nt, unidentified
  misc_feature 1..23: note = Description of Unknown: Target sequence
  source 1..23: mol_type = unassigned RNA
caggaattcctgaattttatgac

SEQ ID NO: 795 - RNA, 23 nt, unidentified
  misc_feature 1..23: note = Description of Unknown: Target sequence
  source 1..23: mol_type = unassigned RNA
tatggtgtgaagccaagatatgg

SEQ ID NO: 796 - RNA, 23 nt, unidentified
  misc_feature 1..23: note = Description of Unknown: Target sequence
  source 1..23: mol_type = unassigned RNA
tgctccctgcacaggatatcaaa

SEQ ID NO: 797 - RNA, 23 nt, unidentified
  misc_feature 1..23: note = Description of Unknown: Target sequence
  source 1..23: mol_type = unassigned RNA
ttatggtgtgaagccaagatatg

SEQ ID NO: 798 - RNA, 23 nt, unidentified
  misc_feature 1..23: note = Description of Unknown: Target sequence
  source 1..23: mol_type = unassigned RNA
gctccctgcacaggatatcaaag

SEQ ID NO: 799 - RNA, 23 nt, unidentified
  misc_feature 1..23: note = Description of Unknown: Target sequence
  source 1..23: mol_type = unassigned RNA
tcaatgaaatcaattatgaagac

SEQ ID NO: 800 - RNA, 23 nt, unidentified
  misc_feature 1..23: note = Description of Unknown: Target sequence
  source 1..23: mol_type = unassigned RNA
ttatctggatgtctatgtgtttg

SEQ ID NO: 801 - RNA, 23 nt, unidentified
  misc_feature 1..23: note = Description of Unknown: Target sequence
  source 1..23: mol_type = unassigned RNA
ggtgaaccaagtgaacatcaatg

SEQ ID NO: 802 - RNA, 23 nt, unidentified
  misc_feature 1..23: note = Description of Unknown: Target sequence
  source 1..23: mol_type = unassigned RNA
agcaggaattcctgaattttatg

SEQ ID NO: 803 - RNA, 23 nt, unidentified
  misc_feature 1..23: note = Description of Unknown: Target sequence
  source 1..23: mol_type = unassigned RNA
tggtgaaccaagtgaacatcaat

SEQ ID NO: 804 - RNA, 21 nt, synthetic construct
  misc_feature 1..21: note = Description of Artificial Sequence: Synthetic oligonucleotide
  source 1..21: mol_type = other RNA
tgccaagattccttcatgtat

SEQ ID NO: 805 - RNA, 21 nt, synthetic construct
  misc_feature 1..21: note = Description of Artificial Sequence: Synthetic oligonucleotide
  source 1..21: mol_type = other RNA
atgtgtttaaagtcaaggatt

SEQ ID NO: 806 - RNA, 21 nt, synthetic construct
  misc_feature 1..21: note = Description of Artificial Sequence: Synthetic oligonucleotide
  source 1..21: mol_type = other RNA
aaagatgaggatttgggtttt

SEQ ID NO: 807 - RNA, 21 nt, synthetic construct
  misc_feature 1..21: note = Description of Artificial Sequence: Synthetic oligonucleotide
  source 1..21: mol_type = other RNA
aaggatgtcaaagctctgttt

SEQ ID NO: 808 - RNA, 21 nt, synthetic construct
  misc_feature 1..21: note = Description of Artificial Sequence: Synthetic oligonucleotide
  source 1..21: mol_type = other RNA
ctaccaaatgattgatgaaat

SEQ ID NO: 809 - RNA, 21 nt, synthetic construct
  misc_feature 1..21: note = Description of Artificial Sequence: Synthetic oligonucleotide
  source 1..21: mol_type = other RNA
atcagttatgaagaccacaat

SEQ ID NO: 810 - RNA, 21 nt, synthetic construct
  misc_feature 1..21: note = Description of Artificial Sequence: Synthetic oligonucleotide
  source 1..21: mol_type = other RNA
ttctaccaaatgattgatgat

SEQ ID NO: 811 - RNA, 21 nt, synthetic construct
  misc_feature 1..21: note = Description of Artificial Sequence: Synthetic oligonucleotide
  source 1..21: mol_type = other RNA
tgtgtttaaagtcaaggatat

SEQ ID NO: 812 - RNA, 21 nt, synthetic construct
  misc_feature 1..21: note = Description of Artificial Sequence: Synthetic oligonucleotide
  source 1..21: mol_type = other RNA
aaatcagttatgaagaccact

SEQ ID NO: 813 - RNA, 21 nt, synthetic construct
  misc_feature 1..21: note = Description of Artificial Sequence: Synthetic oligonucleotide
  source 1..21: mol_type = other RNA
gatgtcaaagctctgtttgtt

SEQ ID NO: 814 - RNA, 21 nt, synthetic construct
  misc_feature 1..21: note = Description of Artificial Sequence: Synthetic oligonucleotide
  source 1..21: mol_type = other RNA
ccagttgtgagagagatgctt

SEQ ID NO: 815 - RNA, 21 nt, synthetic construct
  misc_feature 1..21: note = Description of Artificial Sequence: Synthetic oligonucleotide
  source 1..21: mol_type = other RNA
agccaagatctcagtcactct

SEQ ID NO: 816 - RNA, 21 nt, synthetic construct
  misc_feature 1..21: note = Description of Artificial Sequence: Synthetic oligonucleotide
  source 1..21: mol_type = other RNA
cgcttcattcaagttggtgtt

SEQ ID NO: 817 - RNA, 21 nt, synthetic construct
  misc_feature 1..21: note = Description of Artificial Sequence: Synthetic oligonucleotide
  source 1..21: mol_type = other RNA
catgtgtttaaagtcaaggat

SEQ ID NO: 818 - RNA, 21 nt, synthetic construct
  misc_feature 1..21: note = Description of Artificial Sequence: Synthetic oligonucleotide
  source 1..21: mol_type = other RNA
aatcagttatgaagaccacat

SEQ ID NO: 819 - RNA, 21 nt, synthetic construct
  misc_feature 1..21: note = Description of Artificial Sequence: Synthetic oligonucleotide
  source 1..21: mol_type = other RNA
gaaggatgtcaaagctctgtt

SEQ ID NO: 820 - RNA, 21 nt, synthetic construct
  misc_feature 1..21: note = Description of Artificial Sequence: Synthetic oligonucleotide
  source 1..21: mol_type = other RNA
atgttttctaccaaatgattt

SEQ ID NO: 821 - RNA, 21 nt, synthetic construct
  misc_feature 1..21: note = Description of Artificial Sequence: Synthetic oligonucleotide
  source 1..21: mol_type = other RNA
caagccaagatctcagtcact

SEQ ID NO: 822 - RNA, 21 nt, synthetic construct
  misc_feature 1..21: note = Description of Artificial Sequence: Synthetic oligonucleotide
  source 1..21: mol_type = other RNA
accaacttgattgagaaggtt

SEQ ID NO: 823 - RNA, 21 nt, synthetic construct
  misc_feature 1..21: note = Description of Artificial Sequence: Synthetic oligonucleotide
  source 1..21: mol_type = other RNA
ggatgtcaaagctctgtttgt

SEQ ID NO: 824 - RNA, 21 nt, synthetic construct
  misc_feature 1..21: note = Description of Artificial Sequence: Synthetic oligonucleotide
  source 1..21: mol_type = other RNA
agatgaggatttgggttttct

SEQ ID NO: 825 - RNA, 21 nt, synthetic construct
  misc_feature 1..21: note = Description of Artificial Sequence: Synthetic oligonucleotide
  source 1..21: mol_type = other RNA
gccaagatctcagtcactcgt

SEQ ID NO: 826 - RNA, 21 nt, synthetic construct
  misc_feature 1..21: note = Description of Artificial Sequence: Synthetic oligonucleotide
  source 1..21: mol_type = other RNA
ccgcttcattcaagttggtgt

SEQ ID NO: 827 - RNA, 21 nt, synthetic construct
  misc_feature 1..21: note = Description of Artificial Sequence: Synthetic oligonucleotide
  source 1..21: mol_type = other RNA
gccagttgtgagagagatgct

SEQ ID NO: 828 - RNA, 21 nt, synthetic construct
  misc_feature 1..21: note = Description of Artificial Sequence: Synthetic oligonucleotide
  source 1..21: mol_type = other RNA
tccatgaatatctacctggtt

SEQ ID NO: 829 - RNA, 21 nt, synthetic construct
  misc_feature 1..21: note = Description of Artificial Sequence: Synthetic oligonucleotide
  source 1..21: mol_type = other RNA
gtgtttaaagtcaaggatatt

SEQ ID NO: 830 - RNA, 21 nt, synthetic construct
  misc_feature 1..21: note = Description of Artificial Sequence: Synthetic oligonucleotide
  source 1..21: mol_type = other RNA
aggatgtcaaagctctgtttt

SEQ ID NO: 831 - RNA, 21 nt, synthetic construct
  misc_feature 1..21: note = Description of Artificial Sequence: Synthetic oligonucleotide
  source 1..21: mol_type = other RNA
tcatgtgtttaaagtcaaggt

SEQ ID NO: 832 - RNA, 21 nt, synthetic construct
  misc_feature 1..21: note = Description of Artificial Sequence: Synthetic oligonucleotide
  source 1..21: mol_type = other RNA
aagccaagatctcagtcactt

SEQ ID NO: 833 - RNA, 21 nt, synthetic construct
  misc_feature 1..21: note = Description of Artificial Sequence: Synthetic oligonucleotide
  source 1..21: mol_type = other RNA
tcaaagatgaggatttgggtt

SEQ ID NO: 834 - RNA, 21 nt, synthetic construct
  misc_feature 1..21: note = Description of Artificial Sequence: Synthetic oligonucleotide
  source 1..21: mol_type = other RNA
ccaagatctcagtcactcgct

SEQ ID NO: 835 - RNA, 21 nt, synthetic construct
  misc_feature 1..21: note = Description of Artificial Sequence: Synthetic oligonucleotide
  source 1..21: mol_type = other RNA
gtgctagatggatcagacagt

SEQ ID NO: 836 - RNA, 21 nt, synthetic construct
  misc_feature 1..21: note = Description of Artificial Sequence: Synthetic oligonucleotide
  source 1..21: mol_type = other RNA
caaatctctgagtctctgtgt

SEQ ID NO: 837 - RNA, 21 nt, synthetic construct
  misc_feature 1..21: note = Description of Artificial Sequence: Synthetic oligonucleotide
  source 1..21: mol_type = other RNA
tgctagatggatcagacagct

SEQ ID NO: 838 - RNA, 21 nt, synthetic construct
  misc_feature 1..21: note = Description of Artificial Sequence: Synthetic oligonucleotide
  source 1..21: mol_type = other RNA
gaccacaagctgaagtcaggt

SEQ ID NO: 839 - RNA, 21 nt, synthetic construct
  misc_feature 1..21: note = Description of Artificial Sequence: Synthetic oligonucleotide
  source 1..21: mol_type = other RNA
gtttaaagtcaaggatatggt

SEQ ID NO: 840 - RNA, 21 nt, synthetic construct
  misc_feature 1..21: note = Description of Artificial Sequence: Synthetic oligonucleotide
  source 1..21: mol_type = other RNA
agctcaaagatgaggatttgt

SEQ ID NO: 841 - RNA, 21 nt, synthetic construct
  misc_feature 1..21: note = Description of Artificial Sequence: Synthetic oligonucleotide
  source 1..21: mol_type = other RNA
gagggagtagagatcaaaggt

SEQ ID NO: 842 - RNA, 21 nt, synthetic construct
  misc_feature 1..21: note = Description of Artificial Sequence: Synthetic oligonucleotide
  source 1..21: mol_type = other RNA
tctaccaaatgattgatgaat

SEQ ID NO: 843 - RNA, 21 nt, synthetic construct
  misc_feature 1..21: note = Description of Artificial Sequence: Synthetic oligonucleotide
  source 1..21: mol_type = other RNA
ctcaaagatgaggatttgggt

SEQ ID NO: 844 - RNA, 21 nt, synthetic construct
  misc_feature 1..21: note = Description of Artificial Sequence: Synthetic oligonucleotide
  source 1..21: mol_type = other RNA
ctgccaagattccttcatgtt

SEQ ID NO: 845 - RNA, 21 nt, synthetic construct
  misc_feature 1..21: note = Description of Artificial Sequence: Synthetic oligonucleotide
  source 1..21: mol_type = other RNA
atggcaagccaagatctcagt

SEQ ID NO: 846 - RNA, 21 nt, synthetic construct
  misc_feature 1..21: note = Description of Artificial Sequence: Synthetic oligonucleotide
  source 1..21: mol_type = other RNA
cctggatgtgtatgtgtttgt

SEQ ID NO: 847 - RNA, 21 nt, synthetic construct
  misc_feature 1..21: note = Description of Artificial Sequence: Synthetic oligonucleotide
  source 1..21: mol_type = other RNA
tgtttaaagtcaaggatatgt

SEQ ID NO: 848 - RNA, 21 nt, synthetic construct
  misc_feature 1..21: note = Description of Artificial Sequence: Synthetic oligonucleotide
  source 1..21: mol_type = other RNA
gccgcttcattcaagttggtt

SEQ ID NO: 849 - RNA, 23 nt, synthetic construct
  misc_feature 1..23: note = Description of Artificial Sequence: Synthetic oligonucleotide
  source 1..23: mol_type = other RNA
atacatgaaggaatcttggcagg

SEQ ID NO: 850 - RNA, 23 nt, synthetic construct
  misc_feature 1..23: note = Description of Artificial Sequence: Synthetic oligonucleotide
  source 1..23: mol_type = other RNA
  modified_base 7: mod_base = OTHER; note = thymine
aatccttgactttaaacacatga

SEQ ID NO: 851 - RNA, 23 nt, synthetic construct
  misc_feature 1..23: note = Description of Artificial Sequence: Synthetic oligonucleotide
  source 1..23: mol_type = other RNA
aaaacccaaatcctcatctttga

SEQ ID NO: 852 - RNA, 23 nt, synthetic construct
  misc_feature 1..23: note = Description of Artificial Sequence: Synthetic oligonucleotide
  source 1..23: mol_type = other RNA
aaacagagctttgacatccttca

SEQ ID NO: 853 - RNA, 23 nt, synthetic construct
  misc_feature 1..23: note = Description of Artificial Sequence: Synthetic oligonucleotide
  source 1..23: mol_type = other RNA
  modified_base 7: mod_base = OTHER; note = thymine
atttcatcaatcatttggtagaa

SEQ ID NO: 854 - RNA, 23 nt, synthetic construct
  misc_feature 1..23: note = Description of Artificial Sequence: Synthetic oligonucleotide
  source 1..23: mol_type = other RNA
attgtggtcttcataactgattt

SEQ ID NO: 855 - RNA, 23 nt, synthetic construct
  misc_feature 1..23: note = Description of Artificial Sequence: Synthetic oligonucleotide
  source 1..23: mol_type = other RNA
atcatcaatcatttggtagaaaa

SEQ ID NO: 856 - RNA, 23 nt, synthetic construct
  misc_feature 1..23: note = Description of Artificial Sequence: Synthetic oligonucleotide
  source 1..23: mol_type = other RNA
  modified_base 7: mod_base = OTHER; note = thymine
atatccttgactttaaacacatg

SEQ ID NO: 857 - RNA, 23 nt, synthetic construct
  misc_feature 1..23: note = Description of Artificial Sequence: Synthetic oligonucleotide
  source 1..23: mol_type = other RNA
agtggtcttcataactgatttgg

SEQ ID NO: 858 - RNA, 23 nt, synthetic construct
  misc_feature 1..23: note = Description of Artificial Sequence: Synthetic oligonucleotide
  source 1..23: mol_type = other RNA
aacaaacagagctttgacatcct

SEQ ID NO: 859 - RNA, 23 nt, synthetic construct
  misc_feature 1..23: note = Description of Artificial Sequence: Synthetic oligonucleotide
  source 1..23: mol_type = other RNA
aagcatctctctcacaactggct

SEQ ID NO: 860 - RNA, 23 nt, synthetic construct
  misc_feature 1..23: note = Description of Artificial Sequence: Synthetic oligonucleotide
  source 1..23: mol_type = other RNA
agagtgactgagatcttggcttg

SEQ ID NO: 861 - RNA, 23 nt, synthetic construct
  misc_feature 1..23: note = Description of Artificial Sequence: Synthetic oligonucleotide
  source 1..23: mol_type = other RNA
aacaccaacttgaatgaagcggc

SEQ ID NO: 862 - RNA, 23 nt, synthetic construct
  misc_feature 1..23: note = Description of Artificial Sequence: Synthetic oligonucleotide
  source 1..23: mol_type = other RNA
atccttgactttaaacacatgat

SEQ ID NO: 863 - RNA, 23 nt, synthetic construct
  misc_feature 1..23: note = Description of Artificial Sequence: Synthetic oligonucleotide
  source 1..23: mol_type = other RNA
  modified_base 7: mod_base = OTHER; note = thymine
atgtggtcttcataactgatttg

SEQ ID NO: 864 - RNA, 23 nt, synthetic construct
  misc_feature 1..23: note = Description of Artificial Sequence: Synthetic oligonucleotide
  source 1..23: mol_type = other RNA
aacagagctttgacatccttcac

SEQ ID NO: 865 - RNA, 23 nt, synthetic construct
  misc_feature 1..23: note = Description of Artificial Sequence: Synthetic oligonucleotide
  source 1..23: mol_type = other RNA
  modified_base 7: mod_base = OTHER; note = thymine
aaatcatttggtagaaaacattc

SEQ ID NO: 866 - RNA, 23 nt, synthetic construct
  misc_feature 1..23: note = Description of Artificial Sequence: Synthetic oligonucleotide
  source 1..23: mol_type = other RNA
  modified_base 7: mod_base = OTHER; note = thymine
agtgactgagatcttggcttgcc

SEQ ID NO: 867 - RNA, 23 nt, synthetic construct
  misc_feature 1..23: note = Description of Artificial Sequence: Synthetic oligonucleotide
  source 1..23: mol_type = other RNA
aaccttctcaatcaagttggtga

SEQ ID NO: 868 - RNA, 23 nt, synthetic construct
  misc_feature 1..23: note = Description of Artificial Sequence: Synthetic oligonucleotide
  source 1..23: mol_type = other RNA
acaaacagagctttgacatcctt

SEQ ID NO: 869 - RNA, 23 nt, synthetic construct
  misc_feature 1..23: note = Description of Artificial Sequence: Synthetic oligonucleotide
  source 1..23: mol_type = other RNA
agaaaacccaaatcctcatcttt

SEQ ID NO: 870 - RNA, 23 nt, synthetic construct
  misc_feature 1..23: note = Description of Artificial Sequence: Synthetic oligonucleotide
  source 1..23: mol_type = other RNA
acgagtgactgagatcttggctt

SEQ ID NO: 871 - RNA, 23 nt, synthetic construct
  misc_feature 1..23: note = Description of Artificial Sequence: Synthetic oligonucleotide
  source 1..23: mol_type = other RNA
acaccaacttgaatgaagcggct

SEQ ID NO: 872 - RNA, 23 nt, synthetic construct
  misc_feature 1..23: note = Description of Artificial Sequence: Synthetic oligonucleotide
  source 1..23: mol_type = other RNA
  modified_base 7: mod_base = OTHER; note = thymine
agcatctctctcacaactggctt

SEQ ID NO: 873 - RNA, 23 nt, synthetic construct
  misc_feature 1..23: note = Description of Artificial Sequence: Synthetic oligonucleotide
  source 1..23: mol_type = other RNA
aaccaggtagatattcatggagc

SEQ ID NO: 874 - RNA, 23 nt, synthetic construct
  misc_feature 1..23: note = Description of Artificial Sequence: Synthetic oligonucleotide
  source 1..23: mol_type = other RNA
aatatccttgactttaaacacat

SEQ ID NO: 875 - RNA, 23 nt, synthetic construct
  misc_feature 1..23: note = Description of Artificial Sequence: Synthetic oligonucleotide
  source 1..23: mol_type = other RNA
aaaacagagctttgacatccttc

SEQ ID NO: 876 - RNA, 23 nt, synthetic construct
  misc_feature 1..23: note = Description of Artificial Sequence: Synthetic oligonucleotide
  source 1..23: mol_type = other RNA
accttgactttaaacacatgatg

SEQ ID NO: 877 - RNA, 23 nt, synthetic construct
  misc_feature 1..23: note = Description of Artificial Sequence: Synthetic oligonucleotide
  source 1..23: mol_type = other RNA
aagtgactgagatcttggcttgc

SEQ ID NO: 878 - RNA, 23 nt, synthetic construct
  misc_feature 1..23: note = Description of Artificial Sequence: Synthetic oligonucleotide
  source 1..23: mol_type = other RNA
aacccaaatcctcatctttgagc

SEQ ID NO: 879 - RNA, 23 nt, synthetic construct
  misc_feature 1..23: note = Description of Artificial Sequence: Synthetic oligonucleotide
  source 1..23: mol_type = other RNA
  modified_base 7: mod_base = OTHER; note = thymine
agcgagtgactgagatcttggct

SEQ ID NO: 880 - RNA, 23 nt, synthetic construct
  misc_feature 1..23: note = Description of Artificial Sequence: Synthetic oligonucleotide
  source 1..23: mol_type = other RNA
  modified_base 7: mod_base = OTHER; note = thymine
actgtctgatccatctagcacca

SEQ ID NO: 881 - RNA, 23 nt, synthetic construct
  misc_feature 1..23: note = Description of Artificial Sequence: Synthetic oligonucleotide
  source 1..23: mol_type = other RNA
acacagagactcagagatttggt

SEQ ID NO: 882 - RNA, 23 nt, synthetic construct
  misc_feature 1..23: note = Description of Artificial Sequence: Synthetic oligonucleotide
  source 1..23: mol_type = other RNA
agctgtctgatccatctagcacc

SEQ ID NO: 883 - RNA, 23 nt, synthetic construct
  misc_feature 1..23: note = Description of Artificial Sequence: Synthetic oligonucleotide
  source 1..23: mol_type = other RNA
acctgacttcagcttgtggtctt

SEQ ID NO: 884 - RNA, 23 nt, synthetic construct
  misc_feature 1..23: note = Description of Artificial Sequence: Synthetic oligonucleotide
  source 1..23: mol_type = other RNA
  modified_base 7: mod_base = OTHER; note = thymine
accatatccttgactttaaacac

SEQ ID NO: 885 - RNA, 23 nt, synthetic construct
  misc_feature 1..23: note = Description of Artificial Sequence: Synthetic oligonucleotide
  source 1..23: mol_type = other RNA
acaaatcctcatctttgagcttg

SEQ ID NO: 886 - RNA, 23 nt, synthetic construct
  misc_feature 1..23: note = Description of Artificial Sequence: Synthetic oligonucleotide
  source 1..23: mol_type = other RNA
acctttgatctctactccctcca

SEQ ID NO: 887 - RNA, 23 nt, synthetic construct
  misc_feature 1..23: note = Description of Artificial Sequence: Synthetic oligonucleotide
  source 1..23: mol_type = other RNA
attcatcaatcatttggtagaaa

SEQ ID NO: 888 - RNA, 23 nt, synthetic construct
  misc_feature 1..23: note = Description of Artificial Sequence: Synthetic oligonucleotide
  source 1..23: mol_type = other RNA
acccaaatcctcatctttgagct

SEQ ID NO: 889 - RNA, 23 nt, synthetic construct
  misc_feature 1..23: note = Description of Artificial Sequence: Synthetic oligonucleotide
  source 1..23: mol_type = other RNA
aacatgaaggaatcttggcagga

SEQ ID NO: 890 - RNA, 23 nt, synthetic construct
  misc_feature 1..23: note = Description of Artificial Sequence: Synthetic oligonucleotide
  source 1..23: mol_type = other RNA
actgagatcttggcttgccatgg

SEQ ID NO: 891 - RNA, 23 nt, synthetic construct
  misc_feature 1..23: note = Description of Artificial Sequence: Synthetic oligonucleotide
  source 1..23: mol_type = other RNA
acaaacacatacacatccaggta

SEQ ID NO: 892 - RNA, 23 nt, synthetic construct
  misc_feature 1..23: note = Description of Artificial Sequence: Synthetic oligonucleotide
  source 1..23: mol_type = other RNA
acatatccttgactttaaacaca

SEQ ID NO: 893 - RNA, 23 nt, synthetic construct
  misc_feature 1..23: note = Description of Artificial Sequence: Synthetic oligonucleotide
  source 1..23: mol_type = other RNA
aaccaacttgaatgaagcggctt

SEQ ID NO: 894 - RNA, 21 nt, synthetic construct
  misc_feature 1..21: note = Description of Artificial Sequence: Synthetic oligonucleotide
  source 1..21: mol_type = other RNA
  modified_base 1: mod_base = OTHER; note = 2'-O-methyluridine-3'-phosphorothioate
  modified_base 2: mod_base = OTHER; note = 2'-O-methylguanosine-3'-phosphorothioate
  modified_base 3: mod_base = OTHER; note = 2'-O-methylcytidine-3'-phosphate
  modified_base 4: mod_base = OTHER; note = 2'-O-methylcytidine-3'-phosphate
  modified_base 5: mod_base = OTHER; note = 2'-O-methyladenosine-3'-phosphate
  modified_base 6: mod_base = OTHER; note = 2'-O-methyladenosine-3'-phosphate
  modified_base 7: mod_base = OTHER; note = 2'-fluoroguanosine-3'-phosphate
  modified_base 8: mod_base = OTHER; note = 2'-O-methyladenosine-3'-phosphate
  modified_base 9: mod_base = OTHER; note = 2'-fluorouridine-3'-phosphate
  modified_base 10: mod_base = OTHER; note = 2'-fluorouridine-3'-phosphate
  modified_base 11: mod_base = OTHER; note = 2'-fluorocytidine-3'-phosphate
  modified_base 12: mod_base = OTHER; note = 2'-O-methylcytidine-3'-phosphate
  modified_base 13: mod_base = OTHER; note = 2'-O-methyluridine-3'-phosphate
  modified_base 14: mod_base = OTHER; note = 2'-O-methyluridine-3'-phosphate
  modified_base 15: mod_base = OTHER; note = 2'-O-methylcytidine-3'-phosphate
  modified_base 16: mod_base = OTHER; note = 2'-O-methyladenosine-3'-phosphate
  modified_base 17: mod_base = OTHER; note = 2'-O-methyluridine-3'-phosphate
  modified_base 18: mod_base = OTHER; note = 2'-O-methylguanosine-3'-phosphate
  modified_base 19: mod_base = OTHER; note = 2'-O-methyluridine-3'-phosphate
  modified_base 20: mod_base = OTHER; note = 2'-O-methyladenosine-3'-phosphate
  modified_base 21: mod_base = OTHER; note = 2'-O-methyluridine-3'-phosphate N-[tris(GalNAc-alkyl)-amidodecanoyl)]-4-hydroxyprolinol (Hyp-(GalNAc-alkyl)3)
tgccaagattccttcatgtat

SEQ ID NO: 895 - RNA, 21 nt, synthetic construct
  misc_feature 1..21: note = Description of Artificial Sequence: Synthetic oligonucleotide
  source 1..21: mol_type = other RNA
  modified_base 1: mod_base = OTHER; note = 2'-O-methyladenosine-3'-phosphorothioate
  modified_base 2: mod_base = OTHER; note = 2'-O-methyluridine-3'-phosphorothioate
  modified_base 3: mod_base = OTHER; note = 2'-O-methylguanosine-3'-phosphate
  modified_base 4: mod_base = OTHER; note = 2'-O-methyluridine-3'-phosphate
  modified_base 5: mod_base = OTHER; note = 2'-O-methylguanosine-3'-phosphate
  modified_base 6: mod_base = OTHER; note = 2'-O-methyluridine-3'-phosphate
  modified_base 7: mod_base = OTHER; note = 2'-fluorouridine-3'-phosphate
  modified_base 8: mod_base = OTHER; note = 2'-O-methyluridine-3'-phosphate
  modified_base 9: mod_base = OTHER; note = 2'-fluoroadenosine-3'-phosphate
  modified_base 10: mod_base = OTHER; note = 2'-fluoroadenosine-3'-phosphate
  modified_base 11: mod_base = OTHER; note = 2'-fluoroadenosine-3'-phosphate
  modified_base 12: mod_base = OTHER; note = 2'-O-methylguanosine-3'-phosphate
  modified_base 13: mod_base = OTHER; note = 2'-O-methyluridine-3'-phosphate
  modified_base 14: mod_base = OTHER; note = 2'-O-methylcytidine-3'-phosphate
  modified_base 15: mod_base = OTHER; note = 2'-O-methyladenosine-3'-phosphate
  modified_base 16: mod_base = OTHER; note = 2'-O-methyladenosine-3'-phosphate
  modified_base 17: mod_base = OTHER; note = 2'-O-methylguanosine-3'-phosphate
  modified_base 18: mod_base = OTHER; note = 2'-O-methylguanosine-3'-phosphate
  modified_base 19: mod_base = OTHER; note = 2'-O-methyladenosine-3'-phosphate
  modified_base 20: mod_base = OTHER; note = 2'-O-methyluridine-3'-phosphate
  modified_base 21: mod_base = OTHER; note = 2'-O-methyluridine-3'-phosphate N-[tris(GalNAc-alkyl)-amidodecanoyl)]-4-hydroxyprolinol (Hyp-(GalNAc-alkyl)3)
atgtgtttaaagtcaaggatt

SEQ ID NO: 896 - RNA, 21 nt, synthetic construct
  misc_feature 1..21: note = Description of Artificial Sequence: Synthetic oligonucleotide
  source 1..21: mol_type = other RNA
  modified_base 1: mod_base = OTHER; note = 2'-O-methyladenosine-3'-phosphorothioate
  modified_base 2: mod_base = OTHER; note = 2'-O-methyladenosine-3'-phosphorothioate
  modified_base 3: mod_base = OTHER; note = 2'-O-methyladenosine-3'-phosphate
  modified_base 4: mod_base = OTHER; note = 2'-O-methylguanosine-3'-phosphate
  modified_base 5: mod_base = OTHER; note = 2'-O-methyladenosine-3'-phosphate
  modified_base 6: mod_base = OTHER; note = 2'-O-methyluridine-3'-phosphate
  modified_base 7: mod_base = OTHER; note = 2'-fluoroguanosine-3'-phosphate
  modified_base 8: mod_base = OTHER; note = 2'-O-methyladenosine-3'-phosphate
  modified_base 9: mod_base = OTHER; note = 2'-fluoroguanosine-3'-phosphate
  modified_base 10: mod_base = OTHER; note = 2'-fluoroguanosine-3'-phosphate
  modified_base 11: mod_base = OTHER; note = 2'-fluoroadenosine-3'-phosphate
  modified_base 12: mod_base = OTHER; note = 2'-O-methyluridine-3'-phosphate
  modified_base 13: mod_base = OTHER; note = 2'-O-methyluridine-3'-phosphate
  modified_base 14: mod_base = OTHER; note = 2'-O-methyluridine-3'-phosphate
  modified_base 15: mod_base = OTHER; note = 2'-O-methylguanosine-3'-phosphate
  modified_base 16: mod_base = OTHER; note = 2'-O-methylguanosine-3'-phosphate
  modified_base 17: mod_base = OTHER; note = 2'-O-methylguanosine-3'-phosphate
  modified_base 18: mod_base = OTHER; note = 2'-O-methyluridine-3'-phosphate
  modified_base 19: mod_base = OTHER; note = 2'-O-methyluridine-3'-phosphate
  modified_base 20: mod_base = OTHER; note = 2'-O-methyluridine-3'-phosphate
  modified_base 21: mod_base = OTHER; note = 2'-O-methyluridine-3'-phosphate N-[tris(GalNAc-alkyl)-amidodecanoyl)]-4-hydroxyprolinol (Hyp-(GalNAc-alkyl)3)
aaagatgaggatttgggtttt

SEQ ID NO: 897 - RNA, 21 nt, synthetic construct
  misc_feature 1..21: note = Description of Artificial Sequence: Synthetic oligonucleotide
  source 1..21: mol_type = other RNA
  modified_base 1: mod_base = OTHER; note = 2'-O-methyladenosine-3'-phosphorothioate
  modified_base 2: mod_base = OTHER; note = 2'-O-methyladenosine-3'-phosphorothioate
  modified_base 3: mod_base = OTHER; note = 2'-O-methylguanosine-3'-phosphate
  modified_base 4: mod_base = OTHER; note = 2'-O-methylguanosine-3'-phosphate
  modified_base 5: mod_base = OTHER; note = 2'-O-methyladenosine-3'-phosphate
  modified_base 6: mod_base = OTHER; note = 2'-O-methyluridine-3'-phosphate
  modified_base 7: mod_base = OTHER; note = 2'-fluoroguanosine-3'-phosphate
  modified_base 8: mod_base = OTHER; note = 2'-O-methyluridine-3'-phosphate
  modified_base 9: mod_base = OTHER; note = 2'-fluorocytidine-3'-phosphate
  modified_base 10: mod_base = OTHER; note = 2'-fluoroadenosine-3'-phosphate
  modified_base 11: mod_base = OTHER; note = 2'-fluoroadenosine-3'-phosphate
  modified_base 12: mod_base = OTHER; note = 2'-O-methyladenosine-3'-phosphate
  modified_base 13: mod_base = OTHER; note = 2'-O-methylguanosine-3'-phosphate
  modified_base 14: mod_base = OTHER; note = 2'-O-methylcytidine-3'-phosphate
  modified_base 15: mod_base = OTHER; note = 2'-O-methyluridine-3'-phosphate
  modified_base 16: mod_base = OTHER; note = 2'-O-methylcytidine-3'-phosphate
  modified_base 17: mod_base = OTHER; note = 2'-O-methyluridine-3'-phosphate
  modified_base 18: mod_base = OTHER; note = 2'-O-methylguanosine-3'-phosphate
  modified_base 19: mod_base = OTHER; note = 2'-O-methyluridine-3'-phosphate
  modified_base 20: mod_base = OTHER; note = 2'-O-methyluridine-3'-phosphate
  modified_base 21: mod_base = OTHER; note = 2'-O-methyluridine-3'-phosphate N-[tris(GalNAc-alkyl)-amidodecanoyl)]-4-hydroxyprolinol (Hyp-(GalNAc-alkyl)3)
aaggatgtcaaagctctgttt

SEQ ID NO: 898 - RNA, 21 nt, synthetic construct
  misc_feature 1..21: note = Description of Artificial Sequence: Synthetic oligonucleotide
  source 1..21: mol_type = other RNA
  modified_base 1: mod_base = OTHER; note = 2'-O-methylcytidine-3'-phosphorothioate
  modified_base 2: mod_base = OTHER; note = 2'-O-methyluridine-3'-phosphorothioate
  modified_base 3: mod_base = OTHER; note = 2'-O-methyladenosine-3'-phosphate
  modified_base 4: mod_base = OTHER; note = 2'-O-methylcytidine-3'-phosphate
  modified_base 5: mod_base = OTHER; note = 2'-O-methylcytidine-3'-phosphate
  modified_base 6: mod_base = OTHER; note = 2'-O-methyladenosine-3'-phosphate
  modified_base 7: mod_base = OTHER; note = 2'-fluoroadenosine-3'-phosphate
  modified_base 8: mod_base = OTHER; note = 2'-O-methyladenosine-3'-phosphate
  modified_base 9: mod_base = OTHER; note = 2'-fluorouridine-3'-phosphate
  modified_base 10: mod_base = OTHER; note = 2'-fluoroguanosine-3'-phosphate
  modified_base 11: mod_base = OTHER; note = 2'-fluoroadenosine-3'-phosphate
  modified_base 12: mod_base = OTHER; note = 2'-O-methyluridine-3'-phosphate
  modified_base 13: mod_base = OTHER; note = 2'-O-methyluridine-3'-phosphate
  modified_base 14: mod_base = OTHER; note = 2'-O-methylguanosine-3'-phosphate
  modified_base 15: mod_base = OTHER; note = 2'-O-methyladenosine-3'-phosphate
  modified_base 16: mod_base = OTHER; note = 2'-O-methyluridine-3'-phosphate
  modified_base 17: mod_base = OTHER; note = 2'-O-methylguanosine-3'-phosphate
  modified_base 18: mod_base = OTHER; note = 2'-O-methyladenosine-3'-phosphate
  modified_base 19: mod_base = OTHER; note = 2'-O-methyladenosine-3'-phosphate
  modified_base 20: mod_base = OTHER; note = 2'-O-methyladenosine-3'-phosphate
  modified_base 21: mod_base = OTHER; note = 2'-O-methyluridine-3'-phosphate N-[tris(GalNAc-alkyl)-amidodecanoyl)]-4-hydroxyprolinol (Hyp-(GalNAc-alkyl)3)
ctaccaaatgattgatgaaat

SEQ ID NO: 899 - RNA, 21 nt, synthetic construct
  misc_feature 1..21: note = Description of Artificial Sequence: Synthetic oligonucleotide
  source 1..21: mol_type = other RNA
  modified_base 1: mod_base = OTHER; note = 2'-O-methyladenosine-3'-phosphorothioate
  modified_base 2: mod_base = OTHER; note = 2'-O-methyluridine-3'-phosphorothioate
  modified_base 3: mod_base = OTHER; note = 2'-O-methylcytidine-3'-phosphate
  modified_base 4: mod_base = OTHER; note = 2'-O-methyladenosine-3'-phosphate
  modified_base 5: mod_base = OTHER; note = 2'-O-methylguanosine-3'-phosphate
  modified_base 6: mod_base = OTHER; note = 2'-O-methyluridine-3'-phosphate
  modified_base 7: mod_base = OTHER; note = 2'-fluorouridine-3'-phosphate
  modified_base 8: mod_base = OTHER; note = 2'-O-methyladenosine-3'-phosphate
  modified_base 9: mod_base = OTHER; note = 2'-fluorouridine-3'-phosphate
  modified_base 10: mod_base = OTHER; note = 2'-fluoroguanosine-3'-phosphate
  modified_base 11: mod_base = OTHER; note = 2'-fluoroadenosine-3'-phosphate
  modified_base 12: mod_base = OTHER; note = 2'-O-methyladenosine-3'-phosphate
  modified_base 13: mod_base = OTHER; note = 2'-O-methylguanosine-3'-phosphate
  modified_base 14: mod_base = OTHER; note = 2'-O-methyladenosine-3'-phosphate
  modified_base 15: mod_base = OTHER; note = 2'-O-methylcytidine-3'-phosphate
  modified_base 16: mod_base = OTHER; note = 2'-O-methylcytidine-3'-phosphate
  modified_base 17: mod_base = OTHER; note = 2'-O-methyladenosine-3'-phosphate
  modified_base 18: mod_base = OTHER; note = 2'-O-methylcytidine-3'-phosphate
  modified_base 19: mod_base = OTHER; note = 2'-O-methyladenosine-3'-phosphate
  modified_base 20: mod_base = OTHER; note = 2'-O-methyladenosine-3'-phosphate
  modified_base 21: mod_base = OTHER; note = 2'-O-methyluridine-3'-phosphate N-[tris(GalNAc-alkyl)-amidodecanoyl)]-4-hydroxyprolinol (Hyp-(GalNAc-alkyl)3)
atcagttatgaagaccacaat

SEQ ID NO: 900 - RNA, 21 nt, synthetic construct
  misc_feature 1..21: note = Description of Artificial Sequence: Synthetic oligonucleotide
  source 1..21: mol_type = other RNA
  modified_base 1: mod_base = OTHER; note = 2'-O-methyluridine-3'-phosphorothioate
  modified_base 2: mod_base = OTHER; note = 2'-O-methyluridine-3'-phosphorothioate
  modified_base 3: mod_base = OTHER; note = 2'-O-methylcytidine-3'-phosphate
  modified_base 4: mod_base = OTHER; note = 2'-O-methyluridine-3'-phosphate
  modified_base 5: mod_base = OTHER; note = 2'-O-methyladenosine-3'-phosphate
  modified_base 6: mod_base = OTHER; note = 2'-O-methylcytidine-3'-phosphate
  modified_base 7: mod_base = OTHER; note = 2'-fluorocytidine-3'-phosphate
  modified_base 8: mod_base = OTHER; note = 2'-O-methyladenosine-3'-phosphate
  modified_base 9: mod_base = OTHER; note = 2'-fluoroadenosine-3'-phosphate
  modified_base 10: mod_base = OTHER; note = 2'-fluoroadenosine-3'-phosphate
  modified_base 11: mod_base = OTHER; note = 2'-fluorouridine-3'-phosphate
  modified_base 12: mod_base = OTHER; note = 2'-O-methylguanosine-3'-phosphate
  modified_base 13: mod_base = OTHER; note = 2'-O-methyladenosine-3'-phosphate
  modified_base 14: mod_base = OTHER; note = 2'-O-methyluridine-3'-phosphate
  modified_base 15: mod_base = OTHER; note = 2'-O-methyluridine-3'-phosphate
  modified_base 16: mod_base = OTHER; note = 2'-O-methylguanosine-3'-phosphate
  modified_base 17: mod_base = OTHER; note = 2'-O-methyladenosine-3'-phosphate
  modified_base 18: mod_base = OTHER; note = 2'-O-methyluridine-3'-phosphate
  modified_base 19: mod_base = OTHER; note = 2'-O-methylguanosine-3'-phosphate
  modified_base 20: mod_base = OTHER; note = 2'-O-methyladenosine-3'-phosphate
  modified_base 21: mod_base = OTHER; note = 2'-O-methyluridine-3'-phosphate N-[tris(GalNAc-alkyl)-amidodecanoyl)]-4-hydroxyprolinol (Hyp-(GalNAc-alkyl)3)
ttctaccaaatgattgatgat

SEQ ID NO: 901 - RNA, 21 nt, synthetic construct
  misc_feature 1..21: note = Description of Artificial Sequence: Synthetic oligonucleotide
  source 1..21: mol_type = other RNA
  modified_base 1: mod_base = OTHER; note = 2'-O-methyluridine-3'-phosphorothioate
  modified_base 2: mod_base = OTHER; note = 2'-O-methylguanosine-3'-phosphorothioate
  modified_base 3: mod_base = OTHER; note = 2'-O-methyluridine-3'-phosphate
  modified_base 4: mod_base = OTHER; note = 2'-O-methylguanosine-3'-phosphate
  modified_base 5: mod_base = OTHER; note = 2'-O-methyluridine-3'-phosphate
  modified_base 6: mod_base = OTHER; note = 2'-O-methyluridine-3'-phosphate
  modified_base 7: mod_base = OTHER; note = 2'-fluorouridine-3'-phosphate
  modified_base 8: mod_base = OTHER; note = 2'-O-methyladenosine-3'-phosphate
  modified_base 9: mod_base = OTHER; note = 2'-fluoroadenosine-3'-phosphate
  modified_base 10: mod_base = OTHER; note = 2'-fluoroadenosine-3'-phosphate
  modified_base 11: mod_base = OTHER; note = 2'-fluoroguanosine-3'-phosphate
  modified_base 12: mod_base = OTHER; note = 2'-O-methyluridine-3'-phosphate
  modified_base 13: mod_base = OTHER; note = 2'-O-methylcytidine-3'-phosphate
  modified_base 14: mod_base = OTHER; note = 2'-O-methyladenosine-3'-phosphate
  modified_base 15: mod_base = OTHER; note = 2'-O-methyladenosine-3'-phosphate
  modified_base 16: mod_base = OTHER; note = 2'-O-methylguanosine-3'-phosphate
  modified_base 17: mod_base = OTHER; note = 2'-O-methylguanosine-3'-phosphate
  modified_base 18: mod_base = OTHER; note = 2'-O-methyladenosine-3'-phosphate
  modified_base 19: mod_base = OTHER; note = 2'-O-methyluridine-3'-phosphate
  modified_base 20: mod_base = OTHER; note = 2'-O-methyladenosine-3'-phosphate
  modified_base 21: mod_base = OTHER; note = 2'-O-methyluridine-3'-phosphate N-[tris(GalNAc-alkyl)-amidodecanoyl)]-4-hydroxyprolinol (Hyp-(GalNAc-alkyl)3)
tgtgtttaaagtcaaggatat

SEQ ID NO: 902 - RNA, 21 nt, synthetic construct
  misc_feature 1..21: note = Description of Artificial Sequence: Synthetic oligonucleotide
  source 1..21: mol_type = other RNA
  modified_base 1: mod_base = OTHER; note = 2'-O-methyladenosine-3'-phosphorothioate
  modified_base 2: mod_base = OTHER; note = 2'-O-methyladenosine-3'-phosphorothioate
  modified_base 3: mod_base = OTHER; note = 2'-O-methyladenosine-3'-phosphate
  modified_base 4: mod_base = OTHER; note = 2'-O-methyluridine-3'-phosphate
  modified_base 5: mod_base = OTHER; note = 2'-O-methylcytidine-3'-phosphate
  modified_base 6: mod_base = OTHER; note = 2'-O-methyladenosine-3'-phosphate
  modified_base 7: mod_base = OTHER; note = 2'-fluoroguanosine-3'-phosphate
  modified_base 8: mod_base = OTHER; note = 2'-O-methyluridine-3'-phosphate
  modified_base 9: mod_base = OTHER; note = 2'-fluorouridine-3'-phosphate
  modified_base 10: mod_base = OTHER; note = 2'-fluoroadenosine-3'-phosphate
  modified_base 11: mod_base = OTHER; note = 2'-fluorouridine-3'-phosphate
  modified_base 12: mod_base = OTHER; note = 2'-O-methylguanosine-3'-phosphate
  modified_base 13: mod_base = OTHER; note = 2'-O-methyladenosine-3'-phosphate
  modified_base 14: mod_base = OTHER; note = 2'-O-methyladenosine-3'-phosphate
  modified_base 15: mod_base = OTHER; note = 2'-O-methylguanosine-3'-phosphate
  modified_base 16: mod_base = OTHER; note = 2'-O-methyladenosine-3'-phosphate
  modified_base 17: mod_base = OTHER; note = 2'-O-methylcytidine-3'-phosphate
  modified_base 18: mod_base = OTHER; note = 2'-O-methylcytidine-3'-phosphate
  modified_base 19: mod_base = OTHER; note = 2'-O-methyladenosine-3'-phosphate
  modified_base 20: mod_base = OTHER; note = 2'-O-methylcytidine-3'-phosphate
  modified_base 21: mod_base = OTHER; note = 2'-O-methyluridine-3'-phosphate N-[tris(GalNAc-alkyl)-amidodecanoyl)]-4-hydroxyprolinol (Hyp-(GalNAc-alkyl)3)
aaatcagttatgaagaccact

SEQ ID NO: 903 - RNA, 21 nt, synthetic construct
  misc_feature 1..21: note = Description of Artificial Sequence: Synthetic oligonucleotide
  source 1..21: mol_type = other RNA
  modified_base 1: mod_base = OTHER; note = 2'-O-methylguanosine-3'-phosphorothioate
  modified_base 2: mod_base = OTHER; note = 2'-O-methyladenosine-3'-phosphorothioate
  modified_base 3: mod_base = OTHER; note = 2'-O-methyluridine-3'-phosphate
  modified_base 4: mod_base = OTHER; note = 2'-O-methylguanosine-3'-phosphate
  modified_base 5: mod_base = OTHER; note = 2'-O-methyluridine-3'-phosphate
  modified_base 6: mod_base = OTHER; note = 2'-O-methylcytidine-3'-phosphate
  modified_base 7: mod_base = OTHER; note = 2'-fluoroadenosine-3'-phosphate
  modified_base 8: mod_base = OTHER; note = 2'-O-methyladenosine-3'-phosphate
  modified_base 9: mod_base = OTHER; note = 2'-fluoroadenosine-3'-phosphate
  modified_base 10: mod_base = OTHER; note = 2'-fluoroguanosine-3'-phosphate
  modified_base 11: mod_base = OTHER; note = 2'-fluorocytidine-3'-phosphate
  modified_base 12: mod_base = OTHER; note = 2'-O-methyluridine-3'-phosphate
  modified_base 13: mod_base = OTHER; note = 2'-O-methylcytidine-3'-phosphate
  modified_base 14: mod_base = OTHER; note = 2'-O-methyluridine-3'-phosphate
  modified_base 15: mod_base = OTHER; note = 2'-O-methylguanosine-3'-phosphate
  modified_base 16: mod_base = OTHER; note = 2'-O-methyluridine-3'-phosphate
  modified_base 17: mod_base = OTHER; note = 2'-O-methyluridine-3'-phosphate
  modified_base 18: mod_base = OTHER; note = 2'-O-methyluridine-3'-phosphate
  modified_base 19: mod_base = OTHER; note = 2'-O-methylguanosine-3'-phosphate
  modified_base 20: mod_base = OTHER; note = 2'-O-methyluridine-3'-phosphate
  modified_base 21: mod_base = OTHER; note = 2'-O-methyluridine-3'-phosphate N-[tris(GalNAc-alkyl)-amidodecanoyl)]-4-hydroxyprolinol (Hyp-(GalNAc-alkyl)3)
gatgtcaaagctctgtttgtt

SEQ ID NO: 904 - RNA, 21 nt, synthetic construct
  misc_feature 1..21: note = Description of Artificial Sequence: Synthetic oligonucleotide
  source 1..21: mol_type = other RNA
  modified_base 1: mod_base = OTHER; note = 2'-O-methylcytidine-3'-phosphorothioate
  modified_base 2: mod_base = OTHER; note = 2'-O-methylcytidine-3'-phosphorothioate
  modified_base 3: mod_base = OTHER; note = 2'-O-methyladenosine-3'-phosphate
  modified_base 4: mod_base = OTHER; note = 2'-O-methylguanosine-3'-phosphate
  modified_base 5: mod_base = OTHER; note = 2'-O-methyluridine-3'-phosphate
  modified_base 6: mod_base = OTHER; note = 2'-O-methyluridine-3'-phosphate
  modified_base 7: mod_base = OTHER; note = 2'-fluoroguanosine-3'-phosphate
  modified_base 8: mod_base = OTHER; note = 2'-O-methyluridine-3'-phosphate
  modified_base 9: mod_base = OTHER; note = 2'-fluoroguanosine-3'-phosphate
  modified_base 10: mod_base = OTHER; note = 2'-fluoroadenosine-3'-phosphate
  modified_base 11: mod_base = OTHER; note = 2'-fluoroguanosine-3'-phosphate
  modified_base 12: mod_base = OTHER; note = 2'-O-methyladenosine-3'-phosphate
  modified_base 13: mod_base = OTHER; note = 2'-O-methylguanosine-3'-phosphate
  modified_base 14: mod_base = OTHER; note = 2'-O-methyladenosine-3'-phosphate
  modified_base 15: mod_base = OTHER; note = 2'-O-methylguanosine-3'-phosphate
  modified_base 16: mod_base = OTHER; note = 2'-O-methyladenosine-3'-phosphate
  modified_base 17: mod_base = OTHER; note = 2'-O-methyluridine-3'-phosphate
  modified_base 18: mod_base = OTHER; note = 2'-O-methylguanosine-3'-phosphate
  modified_base 19: mod_base = OTHER; note = 2'-O-methylcytidine-3'-phosphate
  modified_base 20: mod_base = OTHER; note = 2'-O-methyluridine-3'-phosphate
  modified_base 21: mod_base = OTHER; note = 2'-O-methyluridine-3'-phosphate N-[tris(GalNAc-alkyl)-amidodecanoyl)]-4-hydroxyprolinol (Hyp-(GalNAc-alkyl)3)
ccagttgtgagagagatgctt

SEQ ID NO: 905 - RNA, 21 nt, synthetic construct
  misc_feature 1..21: note = Description of Artificial Sequence: Synthetic oligonucleotide
  source 1..21: mol_type = other RNA
  modified_base 1: mod_base = OTHER; note = 2'-O-methyladenosine-3'-phosphorothioate
  modified_base 2: mod_base = OTHER; note = 2'-O-methylguanosine-3'-phosphorothioate
  modified_base 3: mod_base = OTHER; note = 2'-O-methylcytidine-3'-phosphate
  modified_base 4: mod_base = OTHER; note = 2'-O-methylcytidine-3'-phosphate
  modified_base 5: mod_base = OTHER; note = 2'-O-methyladenosine-3'-phosphate
  modified_base 6: mod_base = OTHER; note = 2'-O-methyladenosine-3'-phosphate
  modified_base 7: mod_base = OTHER; note = 2'-fluoroguanosine-3'-phosphate
  modified_base 8: mod_base = OTHER; note = 2'-O-methyladenosine-3'-phosphate
  modified_base 9: mod_base = OTHER; note = 2'-fluorouridine-3'-phosphate
  modified_base 10: mod_base = OTHER; note = 2'-fluorocytidine-3'-phosphate
  modified_base 11: mod_base = OTHER; note = 2'-fluorouridine-3'-phosphate
  modified_base 12: mod_base = OTHER; note = 2'-O-methylcytidine-3'-phosphate
  modified_base 13: mod_base = OTHER; note = 2'-O-methyladenosine-3'-phosphate
  modified_base 14: mod_base = OTHER; note = 2'-O-methylguanosine-3'-phosphate
  modified_base 15: mod_base = OTHER; note = 2'-O-methyluridine-3'-phosphate
  modified_base 16: mod_base = OTHER; note = 2'-O-methylcytidine-3'-phosphate
  modified_base 17: mod_base = OTHER; note = 2'-O-methyladenosine-3'-phosphate
  modified_base 18: mod_base = OTHER; note = 2'-O-methylcytidine-3'-phosphate
  modified_base 19: mod_base = OTHER; note = 2'-O-methyluridine-3'-phosphate
  modified_base 20: mod_base = OTHER; note = 2'-O-methylcytidine-3'-phosphate
  modified_base 21: mod_base = OTHER; note = 2'-O-methyluridine-3'-phosphate N-[tris(GalNAc-alkyl)-amidodecanoyl)]-4-hydroxyprolinol (Hyp-(GalNAc-alkyl)3)
agccaagatctcagtcactct

SEQ ID NO: 906 - RNA, 21 nt, synthetic construct
  misc_feature 1..21: note = Description of Artificial Sequence: Synthetic oligonucleotide
  source 1..21: mol_type = other RNA
  modified_base 1: mod_base = OTHER; note = 2'-O-methylcytidine-3'-phosphorothioate
  modified_base 2: mod_base = OTHER; note = 2'-O-methylguanosine-3'-phosphorothioate
  modified_base 3: mod_base = OTHER; note = 2'-O-methylcytidine-3'-phosphate
  modified_base 4: mod_base = OTHER; note = 2'-O-methyluridine-3'-phosphate
  modified_base 5: mod_base = OTHER; note = 2'-O-methyluridine-3'-phosphate
  modified_base 6: mod_base = OTHER; note = 2'-O-methylcytidine-3'-phosphate
  modified_base 7: mod_base = OTHER; note = 2'-fluoroadenosine-3'-phosphate
  modified_base 8: mod_base = OTHER; note = 2'-O-methyluridine-3'-phosphate
  modified_base 9: mod_base = OTHER; note = 2'-fluorouridine-3'-phosphate
  modified_base 10: mod_base = OTHER; note = 2'-fluorocytidine-3'-phosphate
  modified_base 11: mod_base = OTHER; note = 2'-fluoroadenosine-3'-phosphate
  modified_base 12: mod_base = OTHER; note = 2'-O-methyladenosine-3'-phosphate
  modified_base 13: mod_base = OTHER; note = 2'-O-methylguanosine-3'-phosphate
  modified_base 14: mod_base = OTHER; note = 2'-O-methyluridine-3'-phosphate
  modified_base 15: mod_base = OTHER; note = 2'-O-methyluridine-3'-phosphate
  modified_base 16: mod_base = OTHER; note = 2'-O-methylguanosine-3'-phosphate
  modified_base 17: mod_base = OTHER; note = 2'-O-methylguanosine-3'-phosphate
  modified_base 18: mod_base = OTHER; note = 2'-O-methyluridine-3'-phosphate
  modified_base 19: mod_base = OTHER; note = 2'-O-methylguanosine-3'-phosphate
  modified_base 20: mod_base = OTHER; note = 2'-O-methyluridine-3'-phosphate
  modified_base 21: mod_base = OTHER; note = 2'-O-methyluridine-3'-phosphate N-[tris(GalNAc-alkyl)-amidodecanoyl)]-4-hydroxyprolinol (Hyp-(GalNAc-alkyl)3)
cgcttcattcaagttggtgtt

SEQ ID NO: 907 - RNA, 21 nt, synthetic construct
  misc_feature 1..21: note = Description of Artificial Sequence: Synthetic oligonucleotide
  source 1..21: mol_type = other RNA
  modified_base 1: mod_base = OTHER; note = 2'-O-methylcytidine-3'-phosphorothioate
  modified_base 2: mod_base = OTHER; note = 2'-O-methyladenosine-3'-phosphorothioate
  modified_base 3: mod_base = OTHER; note = 2'-O-methyluridine-3'-phosphate
  modified_base 4: mod_base = OTHER; note = 2'-O-methylguanosine-3'-phosphate
  modified_base 5: mod_base = OTHER; note = 2'-O-methyluridine-3'-phosphate
  modified_base 6: mod_base = OTHER; note = 2'-O-methylguanosine-3'-phosphate
  modified_base 7: mod_base = OTHER; note = 2'-fluorouridine-3'-phosphate
  modified_base 8: mod_base = OTHER; note = 2'-O-methyluridine-3'-phosphate
  modified_base 9: mod_base = OTHER; note = 2'-fluorouridine-3'-phosphate
  modified_base 10: mod_base = OTHER; note = 2'-fluoroadenosine-3'-phosphate
  modified_base 11: mod_base = OTHER; note = 2'-fluoroadenosine-3'-phosphate
  modified_base 12: mod_base = OTHER; note = 2'-O-methyladenosine-3'-phosphate
  modified_base 13: mod_base = OTHER; note = 2'-O-methylguanosine-3'-phosphate
  modified_base 14: mod_base = OTHER; note = 2'-O-methyluridine-3'-phosphate
  modified_base 15: mod_base = OTHER; note = 2'-O-methylcytidine-3'-phosphate
  modified_base 16: mod_base = OTHER; note = 2'-O-methyladenosine-3'-phosphate
  modified_base 17: mod_base = OTHER; note = 2'-O-methyladenosine-3'-phosphate
  modified_base 18: mod_base = OTHER; note = 2'-O-methylguanosine-3'-phosphate
  modified_base 19: mod_base = OTHER; note = 2'-O-methylguanosine-3'-phosphate
  modified_base 20: mod_base = OTHER; note = 2'-O-methyladenosine-3'-phosphate
  modified_base 21: mod_base = OTHER; note = 2'-O-methyluridine-3'-phosphate N-[tris(GalNAc-alkyl)-amidodecanoyl)]-4-hydroxyprolinol (Hyp-(GalNAc-alkyl)3)
catgtgtttaaagtcaaggat

SEQ ID NO: 908 - RNA, 21 nt, synthetic construct
  misc_feature 1..21: note = Description of Artificial Sequence: Synthetic oligonucleotide
  source 1..21: mol_type = other RNA
  modified_base 1: mod_base = OTHER; note = 2'-O-methyladenosine-3'-phosphorothioate
  modified_base 2: mod_base = OTHER; note = 2'-O-methyladenosine-3'-phosphorothioate
  modified_base 3: mod_base = OTHER; note = 2'-O-methyluridine-3'-phosphate
  modified_base 4: mod_base = OTHER; note = 2'-O-methylcytidine-3'-phosphate
  modified_base 5: mod_base = OTHER; note = 2'-O-methyladenosine-3'-phosphate
  modified_base 6: mod_base = OTHER; note = 2'-O-methylguanosine-3'-phosphate
  modified_base 7: mod_base = OTHER; note = 2'-fluorouridine-3'-phosphate
  modified_base 8: mod_base = OTHER; note = 2'-O-methyluridine-3'-phosphate
  modified_base 9: mod_base = OTHER; note = 2'-fluoroadenosine-3'-phosphate
  modified_base 10: mod_base = OTHER; note = 2'-fluorouridine-3'-phosphate
  modified_base 11: mod_base = OTHER; note = 2'-fluoroguanosine-3'-phosphate
  modified_base 12: mod_base = OTHER; note = 2'-O-methyladenosine-3'-phosphate
  modified_base 13: mod_base = OTHER; note = 2'-O-methyladenosine-3'-phosphate
  modified_base 14: mod_base = OTHER; note = 2'-O-methylguanosine-3'-phosphate
  modified_base 15: mod_base = OTHER; note = 2'-O-methyladenosine-3'-phosphate
  modified_base 16: mod_base = OTHER; note = 2'-O-methylcytidine-3'-phosphate
  modified_base 17: mod_base = OTHER; note = 2'-O-methylcytidine-3'-phosphate
  modified_base 18: mod_base = OTHER; note = 2'-O-methyladenosine-3'-phosphate
  modified_base 19: mod_base = OTHER; note = 2'-O-methylcytidine-3'-phosphate
  modified_base 20: mod_base = OTHER; note = 2'-O-methyladenosine-3'-phosphate
  modified_base 21: mod_base = OTHER; note = 2'-O-methyluridine-3'-phosphate N-[tris(GalNAc-alkyl)-amidodecanoyl)]-4-hydroxyprolinol (Hyp-(GalNAc-alkyl)3)
aatcagttatgaagaccacat

SEQ ID NO: 909 - RNA, 21 nt, synthetic construct
  misc_feature 1..21: note = Description of Artificial Sequence: Synthetic oligonucleotide
  source 1..21: mol_type = other RNA
  modified_base 1: mod_base = OTHER; note = 2'-O-methylguanosine-3'-phosphorothioate
  modified_base 2: mod_base = OTHER; note = 2'-O-methyladenosine-3'-phosphorothioate
  modified_base 3: mod_base = OTHER; note = 2'-O-methyladenosine-3'-phosphate
  modified_base 4: mod_base = OTHER; note = 2'-O-methylguanosine-3'-phosphate
  modified_base 5: mod_base = OTHER; note = 2'-O-methylguanosine-3'-phosphate
  modified_base 6: mod_base = OTHER; note = 2'-O-methyladenosine-3'-phosphate
  modified_base 7: mod_base = OTHER; note = 2'-fluorouridine-3'-phosphate
  modified_base 8: mod_base = OTHER; note = 2'-O-methylguanosine-3'-phosphate
  modified_base 9: mod_base = OTHER; note = 2'-fluorouridine-3'-phosphate
  modified_base 10: mod_base = OTHER; note = 2'-fluorocytidine-3'-phosphate
  modified_base 11: mod_base = OTHER; note = 2'-fluoroadenosine-3'-phosphate
  modified_base 12: mod_base = OTHER; note = 2'-O-methyladenosine-3'-phosphate
  modified_base 13: mod_base = OTHER; note = 2'-O-methyladenosine-3'-phosphate
  modified_base 14: mod_base = OTHER; note = 2'-O-methylguanosine-3'-phosphate
  modified_base 15: mod_base = OTHER; note = 2'-O-methylcytidine-3'-phosphate
  modified_base 16: mod_base = OTHER; note = 2'-O-methyluridine-3'-phosphate
  modified_base 17: mod_base = OTHER; note = 2'-O-methylcytidine-3'-phosphate
  modified_base 18: mod_base = OTHER; note = 2'-O-methyluridine-3'-phosphate
  modified_base 19: mod_base = OTHER; note = 2'-O-methylguanosine-3'-phosphate
  modified_base 20: mod_base = OTHER; note = 2'-O-methyluridine-3'-phosphate
  modified_base 21: mod_base = OTHER; note = 2'-O-methyluridine-3'-phosphate N-[tris(GalNAc-alkyl)-amidodecanoyl)]-4-hydroxyprolinol (Hyp-(GalNAc-alkyl)3)
gaaggatgtcaaagctctgtt

SEQ ID NO: 910 - RNA, 21 nt, synthetic construct
  misc_feature 1..21: note = Description of Artificial Sequence: Synthetic oligonucleotide
  source 1..21: mol_type = other RNA
  modified_base 1: mod_base = OTHER; note = 2'-O-methyladenosine-3'-phosphorothioate
  modified_base 2: mod_base = OTHER; note = 2'-O-methyluridine-3'-phosphorothioate
  modified_base 3: mod_base = OTHER; note = 2'-O-methylguanosine-3'-phosphate
  modified_base 4: mod_base = OTHER; note = 2'-O-methyluridine-3'-phosphate
  modified_base 5: mod_base = OTHER; note = 2'-O-methyluridine-3'-phosphate
  modified_base 6: mod_base = OTHER; note = 2'-O-methyluridine-3'-phosphate
  modified_base 7: mod_base = OTHER; note = 2'-fluorouridine-3'-phosphate
  modified_base 8: mod_base = OTHER; note = 2'-O-methylcytidine-3'-phosphate
  modified_base 9: mod_base = OTHER; note = 2'-fluorouridine-3'-phosphate
  modified_base 10: mod_base = OTHER; note = 2'-fluoroadenosine-3'-phosphate
  modified_base 11: mod_base = OTHER; note = 2'-fluorocytidine-3'-phosphate
  modified_base 12: mod_base = OTHER; note = 2'-O-methylcytidine-3'-phosphate
  modified_base 13: mod_base = OTHER; note = 2'-O-methyladenosine-3'-phosphate
  modified_base 14: mod_base = OTHER; note = 2'-O-methyladenosine-3'-phosphate
  modified_base 15: mod_base = OTHER; note = 2'-O-methyladenosine-3'-phosphate
  modified_base 16: mod_base = OTHER; note = 2'-O-methyluridine-3'-phosphate
  modified_base 17: mod_base = OTHER; note = 2'-O-methylguanosine-3'-phosphate
  modified_base 18: mod_base = OTHER; note = 2'-O-methyladenosine-3'-phosphate
  modified_base 19: mod_base = OTHER; note = 2'-O-methyluridine-3'-phosphate
  modified_base 20: mod_base = OTHER; note = 2'-O-methyluridine-3'-phosphate
  modified_base 21: mod_base = OTHER; note = 2'-O-methyluridine-3'-phosphate N-[tris(GalNAc-alkyl)-amidodecanoyl)]-4-hydroxyprolinol (Hyp-(GalNAc-alkyl)3)
atgttttctaccaaatgattt

SEQ ID NO: 911 - RNA, 21 nt, synthetic construct
  misc_feature 1..21: note = Description of Artificial Sequence: Synthetic oligonucleotide
  source 1..21: mol_type = other RNA
  modified_base 1: mod_base = OTHER; note = 2'-O-methylcytidine-3'-phosphorothioate
  modified_base 2: mod_base = OTHER; note = 2'-O-methyladenosine-3'-phosphorothioate
  modified_base 3: mod_base = OTHER; note = 2'-O-methyladenosine-3'-phosphate
  modified_base 4: mod_base = OTHER; note = 2'-O-methylguanosine-3'-phosphate
  modified_base 5: mod_base = OTHER; note = 2'-O-methylcytidine-3'-phosphate
  modified_base 6: mod_base = OTHER; note = 2'-O-methylcytidine-3'-phosphate
  modified_base 7: mod_base = OTHER; note = 2'-fluoroadenosine-3'-phosphate
  modified_base 8: mod_base = OTHER; note = 2'-O-methyladenosine-3'-phosphate
  modified_base 9: mod_base = OTHER; note = 2'-fluoroguanosine-3'-phosphate
  modified_base 10: mod_base = OTHER; note = 2'-fluoroadenosine-3'-phosphate
  modified_base 11: mod_base = OTHER; note = 2'-fluorouridine-3'-phosphate
  modified_base 12: mod_base = OTHER; note = 2'-O-methylcytidine-3'-phosphate
  modified_base 13: mod_base = OTHER; note = 2'-O-methyluridine-3'-phosphate
  modified_base 14: mod_base = OTHER; note = 2'-O-methylcytidine-3'-phosphate
  modified_base 15: mod_base = OTHER; note = 2'-O-methyladenosine-3'-phosphate
  modified_base 16: mod_base = OTHER; note = 2'-O-methylguanosine-3'-phosphate
  modified_base 17: mod_base = OTHER; note = 2'-O-methyluridine-3'-phosphate
  modified_base 18: mod_base = OTHER; note = 2'-O-methylcytidine-3'-phosphate
  modified_base 19: mod_base = OTHER; note = 2'-O-methyladenosine-3'-phosphate
  modified_base 20: mod_base = OTHER; note = 2'-O-methylcytidine-3'-phosphate
  modified_base 21: mod_base = OTHER; note = 2'-O-methyluridine-3'-phosphate N-[tris(GalNAc-alkyl)-amidodecanoyl)]-4-hydroxyprolinol (Hyp-(GalNAc-alkyl)3)
caagccaagatctcagtcact

SEQ ID NO: 912 - RNA, 21 nt, synthetic construct
  misc_feature 1..21: note = Description of Artificial Sequence: Synthetic oligonucleotide
  source 1..21: mol_type = other RNA
  modified_base 1: mod_base = OTHER; note = 2'-O-methyladenosine-3'-phosphorothioate
  modified_base 2: mod_base = OTHER; note = 2'-O-methylcytidine-3'-phosphorothioate
  modified_base 3: mod_base = OTHER; note = 2'-O-methylcytidine-3'-phosphate
  modified_base 4: mod_base = OTHER; note = 2'-O-methyladenosine-3'-phosphate
  modified_base 5: mod_base = OTHER; note = 2'-O-methyladenosine-3'-phosphate
  modified_base 6: mod_base = OTHER; note = 2'-O-methylcytidine-3'-phosphate
  modified_base 7: mod_base = OTHER; note = 2'-fluorouridine-3'-phosphate
  modified_base 8: mod_base = OTHER; note = 2'-O-methyluridine-3'-phosphate
  modified_base 9: mod_base = OTHER; note = 2'-fluoroguanosine-3'-phosphate
  modified_base 10: mod_base = OTHER; note = 2'-fluoroadenosine-3'-phosphate
  modified_base 11: mod_base = OTHER; note = 2'-fluorouridine-3'-phosphate
  modified_base 12: mod_base = OTHER; note = 2'-O-methyluridine-3'-phosphate
  modified_base 13: mod_base = OTHER; note = 2'-O-methylguanosine-3'-phosphate
  modified_base 14: mod_base = OTHER; note = 2'-O-methyladenosine-3'-phosphate
  modified_base 15: mod_base = OTHER; note = 2'-O-methylguanosine-3'-phosphate
  modified_base 16: mod_base = OTHER; note = 2'-O-methyladenosine-3'-phosphate
  modified_base 17: mod_base = OTHER; note = 2'-O-methyladenosine-3'-phosphate
  modified_base 18: mod_base = OTHER; note = 2'-O-methylguanosine-3'-phosphate
  modified_base 19: mod_base = OTHER; note = 2'-O-methylguanosine-3'-phosphate
  modified_base 20: mod_base = OTHER; note = 2'-O-methyluridine-3'-phosphate
  modified_base 21: mod_base = OTHER; note = 2'-O-methyluridine-3'-phosphate N-[tris(GalNAc-alkyl)-amidodecanoyl)]-4-hydroxyprolinol (Hyp-(GalNAc-alkyl)3)
accaacttgattgagaaggtt

SEQ ID NO: 913 - RNA, 21 nt, synthetic construct
  misc_feature 1..21: note = Description of Artificial Sequence: Synthetic oligonucleotide
  source 1..21: mol_type = other RNA
  modified_base 1: mod_base = OTHER; note = 2'-O-methylguanosine-3'-phosphorothioate
  modified_base 2: mod_base = OTHER; note = 2'-O-methylguanosine-3'-phosphorothioate
  modified_base 3: mod_base = OTHER; note = 2'-O-methyladenosine-3'-phosphate
  modified_base 4: mod_base = OTHER; note = 2'-O-methyluridine-3'-phosphate
  modified_base 5: mod_base = OTHER; note = 2'-O-methylguanosine-3'-phosphate
  modified_base 6: mod_base = OTHER; note = 2'-O-methyluridine-3'-phosphate
  modified_base 7: mod_base = OTHER; note = 2'-fluorocytidine-3'-phosphate
  modified_base 8: mod_base = OTHER; note = 2'-O-methyladenosine-3'-phosphate
  modified_base 9: mod_base = OTHER; note = 2'-fluoroadenosine-3'-phosphate
  modified_base 10: mod_base = OTHER; note = 2'-fluoroadenosine-3'-phosphate
  modified_base 11: mod_base = OTHER; note = 2'-fluoroguanosine-3'-phosphate
  modified_base 12: mod_base = OTHER; note = 2'-O-methylcytidine-3'-phosphate
  modified_base 13: mod_base = OTHER; note = 2'-O-methyluridine-3'-phosphate
  modified_base 14: mod_base = OTHER; note = 2'-O-methylcytidine-3'-phosphate
  modified_base 15: mod_base = OTHER; note = 2'-O-methyluridine-3'-phosphate
  modified_base 16: mod_base = OTHER; note = 2'-O-methylguanosine-3'-phosphate
  modified_base 17: mod_base = OTHER; note = 2'-O-methyluridine-3'-phosphate
  modified_base 18: mod_base = OTHER; note = 2'-O-methyluridine-3'-phosphate
  modified_base 19: mod_base = OTHER; note = 2'-O-methyluridine-3'-phosphate
  modified_base 20: mod_base = OTHER; note = 2'-O-methylguanosine-3'-phosphate
  modified_base 21: mod_base = OTHER; note = 2'-O-methyluridine-3'-phosphate N-[tris(GalNAc-alkyl)-amidodecanoyl)]-4-hydroxyprolinol (Hyp-(GalNAc-alkyl)3)
ggatgtcaaagctctgtttgt

SEQ ID NO: 914 - RNA, 21 nt, synthetic construct
  misc_feature 1..21: note = Description of Artificial Sequence: Synthetic oligonucleotide
  source 1..21: mol_type = other RNA
  modified_base 1: mod_base = OTHER; note = 2'-O-methyladenosine-3'-phosphorothioate
  modified_base 2: mod_base = OTHER; note = 2'-O-methylguanosine-3'-phosphorothioate
  modified_base 3: mod_base = OTHER; note = 2'-O-methyladenosine-3'-phosphate
  modified_base 4: mod_base = OTHER; note = 2'-O-methyluridine-3'-phosphate
  modified_base 5: mod_base = OTHER; note = 2'-O-methylguanosine-3'-phosphate
  modified_base 6: mod_base = OTHER; note = 2'-O-methyladenosine-3'-phosphate
  modified_base 7: mod_base = OTHER; note = 2'-fluoroguanosine-3'-phosphate
  modified_base 8: mod_base = OTHER; note = 2'-O-methylguanosine-3'-phosphate
  modified_base 9: mod_base = OTHER; note = 2'-fluoroadenosine-3'-phosphate
  modified_base 10: mod_base = OTHER; note = 2'-fluorouridine-3'-phosphate
  modified_base 11: mod_base = OTHER; note = 2'-fluorouridine-3'-phosphate
  modified_base 12: mod_base = OTHER; note = 2'-O-methyluridine-3'-phosphate
  modified_base 13: mod_base = OTHER; note = 2'-O-methylguanosine-3'-phosphate
  modified_base 14: mod_base = OTHER; note = 2'-O-methylguanosine-3'-phosphate
  modified_base 15: mod_base = OTHER; note = 2'-O-methylguanosine-3'-phosphate
  modified_base 16: mod_base = OTHER; note = 2'-O-methyluridine-3'-phosphate
  modified_base 17: mod_base = OTHER; note = 2'-O-methyluridine-3'-phosphate
  modified_base 18: mod_base = OTHER; note = 2'-O-methyluridine-3'-phosphate
  modified_base 19: mod_base = OTHER; note = 2'-O-methyluridine-3'-phosphate
  modified_base 20: mod_base = OTHER; note = 2'-O-methylcytidine-3'-phosphate
  modified_base 21: mod_base = OTHER; note = 2'-O-methyluridine-3'-phosphate N-[tris(GalNAc-alkyl)-amidodecanoyl)]-4-hydroxyprolinol (Hyp-(GalNAc-alkyl)3)
agatgaggatttgggttttct

SEQ ID NO: 915 - RNA, 21 nt, synthetic construct
  misc_feature 1..21: note = Description of Artificial Sequence: Synthetic oligonucleotide
  source 1..21: mol_type = other RNA
  modified_base 1: mod_base = OTHER; note = 2'-O-methylguanosine-3'-phosphorothioate
  modified_base 2: mod_base = OTHER; note = 2'-O-methylcytidine-3'-phosphorothioate
  modified_base 3: mod_base = OTHER; note = 2'-O-methylcytidine-3'-phosphate
  modified_base 4: mod_base = OTHER; note = 2'-O-methyladenosine-3'-phosphate
  modified_base 5: mod_base = OTHER; note = 2'-O-methyladenosine-3'-phosphate
  modified_base 6: mod_base = OTHER; note = 2'-O-methylguanosine-3'-phosphate
  modified_base 7: mod_base = OTHER; note = 2'-fluoroadenosine-3'-phosphate
  modified_base 8: mod_base = OTHER; note = 2'-O-methyluridine-3'-phosphate
  modified_base 9: mod_base = OTHER; note = 2'-fluorocytidine-3'-phosphate
  modified_base 10: mod_base = OTHER; note = 2'-fluorouridine-3'-phosphate
  modified_base 11: mod_base = OTHER; note = 2'-fluorocytidine-3'-phosphate
  modified_base 12: mod_base = OTHER; note = 2'-O-methyladenosine-3'-phosphate
  modified_base 13: mod_base = OTHER; note = 2'-O-methylguanosine-3'-phosphate
  modified_base 14: mod_base = OTHER; note = 2'-O-methyluridine-3'-phosphate
  modified_base 15: mod_base = OTHER; note = 2'-O-methylcytidine-3'-phosphate
  modified_base 16: mod_base = OTHER; note = 2'-O-methyladenosine-3'-phosphate
  modified_base 17: mod_base = OTHER; note = 2'-O-methylcytidine-3'-phosphate
  modified_base 18: mod_base = OTHER; note = 2'-O-methyluridine-3'-phosphate
  modified_base 19: mod_base = OTHER; note = 2'-O-methylcytidine-3'-phosphate
  modified_base 20: mod_base = OTHER; note = 2'-O-methylguanosine-3'-phosphate
  modified_base 21: mod_base = OTHER; note = 2'-O-methyluridine-3'-phosphate N-[tris(GalNAc-alkyl)-amidodecanoyl)]-4-hydroxyprolinol (Hyp-(GalNAc-alkyl)3)
gccaagatctcagtcactcgt

SEQ ID NO: 916 - RNA, 21 nt, synthetic construct
  misc_feature 1..21: note = Description of Artificial Sequence: Synthetic oligonucleotide
  source 1..21: mol_type = other RNA
  modified_base 1: mod_base = OTHER; note = 2'-O-methylcytidine-3'-phosphorothioate
  modified_base 2: mod_base = OTHER; note = 2'-O-methylcytidine-3'-phosphorothioate
  modified_base 3: mod_base = OTHER; note = 2'-O-methylguanosine-3'-phosphate
  modified_base 4: mod_base = OTHER; note = 2'-O-methylcytidine-3'-phosphate
  modified_base 5: mod_base = OTHER; note = 2'-O-methyluridine-3'-phosphate
  modified_base 6: mod_base = OTHER; note = 2'-O-methyluridine-3'-phosphate
  modified_base 7: mod_base = OTHER; note = 2'-fluorocytidine-3'-phosphate
  modified_base 8: mod_base = OTHER; note = 2'-O-methyladenosine-3'-phosphate
  modified_base 9: mod_base = OTHER; note = 2'-fluorouridine-3'-phosphate
  modified_base 10: mod_base = OTHER; note = 2'-fluorouridine-3'-phosphate
  modified_base 11: mod_base = OTHER; note = 2'-fluorocytidine-3'-phosphate
  modified_base 12: mod_base = OTHER; note = 2'-O-methyladenosine-3'-phosphate
  modified_base 13: mod_base = OTHER; note = 2'-O-methyladenosine-3'-phosphate
  modified_base 14: mod_base = OTHER; note = 2'-O-methylguanosine-3'-phosphate
  modified_base 15: mod_base = OTHER; note = 2'-O-methyluridine-3'-phosphate
  modified_base 16: mod_base = OTHER; note = 2'-O-methyluridine-3'-phosphate
  modified_base 17: mod_base = OTHER; note = 2'-O-methylguanosine-3'-phosphate
  modified_base 18: mod_base = OTHER; note = 2'-O-methylguanosine-3'-phosphate
  modified_base 19: mod_base = OTHER; note = 2'-O-methyluridine-3'-phosphate
  modified_base 20: mod_base = OTHER; note = 2'-O-methylguanosine-3'-phosphate
  modified_base 21: mod_base = OTHER; note = 2'-O-methyluridine-3'-phosphate N-[tris(GalNAc-alkyl)-amidodecanoyl)]-4-hydroxyprolinol (Hyp-(GalNAc-alkyl)3)
ccgcttcattcaagttggtgt

SEQ ID NO: 917 - RNA, 21 nt, synthetic construct
  misc_feature 1..21: note = Description of Artificial Sequence: Synthetic oligonucleotide
  source 1..21: mol_type = other RNA
  modified_base 1: mod_base = OTHER; note = 2'-O-methylguanosine-3'-phosphorothioate
  modified_base 2: mod_base = OTHER; note = 2'-O-methylcytidine-3'-phosphorothioate
  modified_base 3: mod_base = OTHER; note = 2'-O-methylcytidine-3'-phosphate
  modified_base 4: mod_base = OTHER; note = 2'-O-methyladenosine-3'-phosphate
  modified_base 5: mod_base = OTHER; note = 2'-O-methylguanosine-3'-phosphate
  modified_base 6: mod_base = OTHER; note = 2'-O-methyluridine-3'-phosphate
  modified_base 7: mod_base = OTHER; note = 2'-fluorouridine-3'-phosphate
  modified_base 8: mod_base = OTHER; note = 2'-O-methylguanosine-3'-phosphate
  modified_base 9: mod_base = OTHER; note = 2'-fluorouridine-3'-phosphate
  modified_base 10: mod_base = OTHER; note = 2'-fluoroguanosine-3'-phosphate
  modified_base 11: mod_base = OTHER; note = 2'-fluoroadenosine-3'-phosphate
  modified_base 12: mod_base = OTHER; note = 2'-O-methylguanosine-3'-phosphate
  modified_base 13: mod_base = OTHER; note = 2'-O-methyladenosine-3'-phosphate
  modified_base 14: mod_base = OTHER; note = 2'-O-methylguanosine-3'-phosphate
  modified_base 15: mod_base = OTHER; note = 2'-O-methyladenosine-3'-phosphate
  modified_base 16: mod_base = OTHER; note = 2'-O-methylguanosine-3'-phosphate
  modified_base 17: mod_base = OTHER; note = 2'-O-methyladenosine-3'-phosphate
  modified_base 18: mod_base = OTHER; note = 2'-O-methyluridine-3'-phosphate
  modified_base 19: mod_base = OTHER; note = 2'-O-methylguanosine-3'-phosphate
  modified_base 20: mod_base = OTHER; note = 2'-O-methylcytidine-3'-phosphate
  modified_base 21: mod_base = OTHER; note = 2'-O-methyluridine-3'-phosphate N-[tris(GalNAc-alkyl)-amidodecanoyl)]-4-hydroxyprolinol (Hyp-(GalNAc-alkyl)3)
gccagttgtgagagagatgct

SEQ ID NO: 918 - RNA, 21 nt, synthetic construct
  misc_feature 1..21: note = Description of Artificial Sequence: Synthetic oligonucleotide
  source 1..21: mol_type = other RNA
  modified_base 1: mod_base = OTHER; note = 2'-O-methyluridine-3'-phosphorothioate
  modified_base 2: mod_base = OTHER; note = 2'-O-methylcytidine-3'-phosphorothioate
  modified_base 3: mod_base = OTHER; note = 2'-O-methylcytidine-3'-phosphate
  modified_base 4: mod_base = OTHER; note = 2'-O-methyladenosine-3'-phosphate
  modified_base 5: mod_base = OTHER; note = 2'-O-methyluridine-3'-phosphate
  modified_base 6: mod_base = OTHER; note = 2'-O-methylguanosine-3'-phosphate
  modified_base 7: mod_base = OTHER; note = 2'-fluoroadenosine-3'-phosphate
  modified_base 8: mod_base = OTHER; note = 2'-O-methyladenosine-3'-phosphate
  modified_base 9: mod_base = OTHER; note = 2'-fluorouridine-3'-phosphate
  modified_base 10: mod_base = OTHER; note = 2'-fluoroadenosine-3'-phosphate
  modified_base 11: mod_base = OTHER; note = 2'-fluorouridine-3'-phosphate
  modified_base 12: mod_base = OTHER; note = 2'-O-methylcytidine-3'-phosphate
  modified_base 13: mod_base = OTHER; note = 2'-O-methyluridine-3'-phosphate
  modified_base 14: mod_base = OTHER; note = 2'-O-methyladenosine-3'-phosphate
  modified_base 15: mod_base = OTHER; note = 2'-O-methylcytidine-3'-phosphate
  modified_base 16: mod_base = OTHER; note = 2'-O-methylcytidine-3'-phosphate
  modified_base 17: mod_base = OTHER; note = 2'-O-methyluridine-3'-phosphate
  modified_base 18: mod_base = OTHER; note = 2'-O-methylguanosine-3'-phosphate
  modified_base 19: mod_base = OTHER; note = 2'-O-methylguanosine-3'-phosphate
  modified_base 20: mod_base = OTHER; note = 2'-O-methyluridine-3'-phosphate
  modified_base 21: mod_base = OTHER; note = 2'-O-methyluridine-3'-phosphate N-[tris(GalNAc-alkyl)-amidodecanoyl)]-4-hydroxyprolinol (Hyp-(GalNAc-alkyl)3)
tccatgaatatctacctggtt

SEQ ID NO: 919 - RNA, 21 nt, synthetic construct
  misc_feature 1..21: note = Description of Artificial Sequence: Synthetic oligonucleotide
  source 1..21: mol_type = other RNA
  modified_base 1: mod_base = OTHER; note = 2'-O-methylguanosine-3'-phosphorothioate
  modified_base 2: mod_base = OTHER; note = 2'-O-methyluridine-3'-phosphorothioate
  modified_base 3: mod_base = OTHER; note = 2'-O-methylguanosine-3'-phosphate
  modified_base 4: mod_base = OTHER; note = 2'-O-methyluridine-3'-phosphate
  modified_base 5: mod_base = OTHER; note = 2'-O-methyluridine-3'-phosphate
  modified_base 6: mod_base = OTHER; note = 2'-O-methyluridine-3'-phosphate
  modified_base 7: mod_base = OTHER; note = 2'-fluoroadenosine-3'-phosphate
  modified_base 8: mod_base = OTHER; note = 2'-O-methyladenosine-3'-phosphate
  modified_base 9: mod_base = OTHER; note = 2'-fluoroadenosine-3'-phosphate
  modified_base 10: mod_base = OTHER; note = 2'-fluoroguanosine-3'-phosphate
  modified_base 11: mod_base = OTHER; note = 2'-fluorouridine-3'-phosphate
  modified_base 12: mod_base = OTHER; note = 2'-O-methylcytidine-3'-phosphate
  modified_base 13: mod_base = OTHER; note = 2'-O-methyladenosine-3'-phosphate
  modified_base 14: mod_base = OTHER; note = 2'-O-methyladenosine-3'-phosphate
  modified_base 15: mod_base = OTHER; note = 2'-O-methylguanosine-3'-phosphate
  modified_base 16: mod_base = OTHER; note = 2'-O-methylguanosine-3'-phosphate
  modified_base 17: mod_base = OTHER; note = 2'-O-methyladenosine-3'-phosphate
  modified_base 18: mod_base = OTHER; note = 2'-O-methyluridine-3'-phosphate
  modified_base 19: mod_base = OTHER; note = 2'-O-methyladenosine-3'-phosphate
  modified_base 20: mod_base = OTHER; note = 2'-O-methyluridine-3'-phosphate
  modified_base 21: mod_base = OTHER; note = 2'-O-methyluridine-3'-phosphate N-[tris(GalNAc-alkyl)-amidodecanoyl)]-4-hydroxyprolinol (Hyp-(GalNAc-alkyl)3)
gtgtttaaagtcaaggatatt

SEQ ID NO: 920 - RNA, 21 nt, synthetic construct
  misc_feature 1..21: note = Description of Artificial Sequence: Synthetic oligonucleotide
  source 1..21: mol_type = other RNA
  modified_base 1: mod_base = OTHER; note = 2'-O-methyladenosine-3'-phosphorothioate
  modified_base 2: mod_base = OTHER; note = 2'-O-methylguanosine-3'-phosphorothioate
  modified_base 3: mod_base = OTHER; note = 2'-O-methylguanosine-3'-phosphate
  modified_base 4: mod_base = OTHER; note = 2'-O-methyladenosine-3'-phosphate
  modified_base 5: mod_base = OTHER; note = 2'-O-methyluridine-3'-phosphate
  modified_base 6: mod_base = OTHER; note = 2'-O-methylguanosine-3'-phosphate
  modified_base 7: mod_base = OTHER; note = 2'-fluorouridine-3'-phosphate
  modified_base 8: mod_base = OTHER; note = 2'-O-methylcytidine-3'-phosphate
  modified_base 9: mod_base = OTHER; note = 2'-fluoroadenosine-3'-phosphate
  modified_base 10: mod_base = OTHER; note = 2'-fluoroadenosine-3'-phosphate
  modified_base 11: mod_base = OTHER; note = 2'-fluoroadenosine-3'-phosphate
  modified_base 12: mod_base = OTHER; note = 2'-O-methylguanosine-3'-phosphate
  modified_base 13: mod_base = OTHER; note = 2'-O-methylcytidine-3'-phosphate
  modified_base 14: mod_base = OTHER; note = 2'-O-methyluridine-3'-phosphate
  modified_base 15: mod_base = OTHER; note = 2'-O-methylcytidine-3'-phosphate
  modified_base 16: mod_base = OTHER; note = 2'-O-methyluridine-3'-phosphate
  modified_base 17: mod_base = OTHER; note = 2'-O-methylguanosine-3'-phosphate
  modified_base 18: mod_base = OTHER; note = 2'-O-methyluridine-3'-phosphate
  modified_base 19: mod_base = OTHER; note = 2'-O-methyluridine-3'-phosphate
  modified_base 20: mod_base = OTHER; note = 2'-O-methyluridine-3'-phosphate
  modified_base 21: mod_base = OTHER; note = 2'-O-methyluridine-3'-phosphate N-[tris(GalNAc-alkyl)-amidodecanoyl)]-4-hydroxyprolinol (Hyp-(GalNAc-alkyl)3)
aggatgtcaaagctctgtttt

SEQ ID NO: 921 - RNA, 21 nt, synthetic construct
  misc_feature 1..21: note = Description of Artificial Sequence: Synthetic oligonucleotide
  source 1..21: mol_type = other RNA
  modified_base 1: mod_base = OTHER; note = 2'-O-methyluridine-3'-phosphorothioate
  modified_base 2: mod_base = OTHER; note = 2'-O-methylcytidine-3'-phosphorothioate
  modified_base 3: mod_base = OTHER; note = 2'-O-methyladenosine-3'-phosphate
  modified_base 4: mod_base = OTHER; note = 2'-O-methyluridine-3'-phosphate
  modified_base 5: mod_base = OTHER; note = 2'-O-methylguanosine-3'-phosphate
  modified_base 6: mod_base = OTHER; note = 2'-O-methyluridine-3'-phosphate
  modified_base 7: mod_base = OTHER; note = 2'-fluoroguanosine-3'-phosphate
  modified_base 8: mod_base = OTHER; note = 2'-O-methyluridine-3'-phosphate
  modified_base 9: mod_base = OTHER; note = 2'-fluorouridine-3'-phosphate
  modified_base 10: mod_base = OTHER; note = 2'-fluorouridine-3'-phosphate
  modified_base 11: mod_base = OTHER; note = 2'-fluoroadenosine-3'-phosphate
  modified_base 12: mod_base = OTHER; note = 2'-O-methyladenosine-3'-phosphate
  modified_base 13: mod_base = OTHER; note = 2'-O-methyladenosine-3'-phosphate
  modified_base 14: mod_base = OTHER; note = 2'-O-methylguanosine-3'-phosphate
  modified_base 15: mod_base = OTHER; note = 2'-O-methyluridine-3'-phosphate
  modified_base 16: mod_base = OTHER; note = 2'-O-methylcytidine-3'-phosphate
  modified_base 17: mod_base = OTHER; note = 2'-O-methyladenosine-3'-phosphate
  modified_base 18: mod_base = OTHER; note = 2'-O-methyladenosine-3'-phosphate
  modified_base 19: mod_base = OTHER; note = 2'-O-methylguanosine-3'-phosphate
  modified_base 20: mod_base = OTHER; note = 2'-O-methylguanosine-3'-phosphate
  modified_base 21: mod_base = OTHER; note = 2'-O-methyluridine-3'-phosphate N-[tris(GalNAc-alkyl)-amidodecanoyl)]-4-hydroxyprolinol (Hyp-(GalNAc-alkyl)3)
tcatgtgtttaaagtcaaggt

SEQ ID NO: 922 - RNA, 21 nt, synthetic construct
  misc_feature 1..21: note = Description of Artificial Sequence: Synthetic oligonucleotide
  source 1..21: mol_type = other RNA
  modified_base 1: mod_base = OTHER; note = 2'-O-methyladenosine-3'-phosphorothioate
  modified_base 2: mod_base = OTHER; note = 2'-O-methyladenosine-3'-phosphorothioate
  modified_base 3: mod_base = OTHER; note = 2'-O-methylguanosine-3'-phosphate
  modified_base 4: mod_base = OTHER; note = 2'-O-methylcytidine-3'-phosphate
  modified_base 5: mod_base = OTHER; note = 2'-O-methylcytidine-3'-phosphate
  modified_base 6: mod_base = OTHER; note = 2'-O-methyladenosine-3'-phosphate
  modified_base 7: mod_base = OTHER; note = 2'-fluoroadenosine-3'-phosphate
  modified_base 8: mod_base = OTHER; note = 2'-O-methylguanosine-3'-phosphate
  modified_base 9: mod_base = OTHER; note = 2'-fluoroadenosine-3'-phosphate
  modified_base 10: mod_base = OTHER; note = 2'-fluorouridine-3'-phosphate
  modified_base 11: mod_base = OTHER; note = 2'-fluorocytidine-3'-phosphate
  modified_base 12: mod_base = OTHER; note = 2'-O-methyluridine-3'-phosphate
  modified_base 13: mod_base = OTHER; note = 2'-O-methylcytidine-3'-phosphate
  modified_base 14: mod_base = OTHER; note = 2'-O-methyladenosine-3'-phosphate
  modified_base 15: mod_base = OTHER; note = 2'-O-methylguanosine-3'-phosphate
  modified_base 16: mod_base = OTHER; note = 2'-O-methyluridine-3'-phosphate
  modified_base 17: mod_base = OTHER; note = 2'-O-methylcytidine-3'-phosphate
  modified_base 18: mod_base = OTHER; note = 2'-O-methyladenosine-3'-phosphate
  modified_base 19: mod_base = OTHER; note = 2'-O-methylcytidine-3'-phosphate
  modified_base 20: mod_base = OTHER; note = 2'-O-methyluridine-3'-phosphate
  modified_base 21: mod_base = OTHER; note = 2'-O-methyluridine-3'-phosphate N-[tris(GalNAc-alkyl)-amidodecanoyl)]-4-hydroxyprolinol (Hyp-(GalNAc-alkyl)3)
aagccaagatctcagtcactt

SEQ ID NO: 923 - RNA, 21 nt, synthetic construct
  misc_feature 1..21: note = Description of Artificial Sequence: Synthetic oligonucleotide
  source 1..21: mol_type = other RNA
  modified_base 1: mod_base = OTHER; note = 2'-O-methyluridine-3'-phosphorothioate
  modified_base 2: mod_base = OTHER; note = 2'-O-methylcytidine-3'-phosphorothioate
  modified_base 3: mod_base = OTHER; note = 2'-O-methyladenosine-3'-phosphate
  modified_base 4: mod_base = OTHER; note = 2'-O-methyladenosine-3'-phosphate
  modified_base 5: mod_base = OTHER; note = 2'-O-methyladenosine-3'-phosphate
  modified_base 6: mod_base = OTHER; note = 2'-O-methylguanosine-3'-phosphate
  modified_base 7: mod_base = OTHER; note = 2'-fluoroadenosine-3'-phosphate
  modified_base 8: mod_base = OTHER; note = 2'-O-methyluridine-3'-phosphate
  modified_base 9: mod_base = OTHER; note = 2'-fluoroguanosine-3'-phosphate
  modified_base 10: mod_base = OTHER; note = 2'-fluoroadenosine-3'-phosphate
  modified_base 11: mod_base = OTHER; note = 2'-fluoroguanosine-3'-phosphate
  modified_base 12: mod_base = OTHER; note = 2'-O-methylguanosine-3'-phosphate
  modified_base 13: mod_base = OTHER; note = 2'-O-methyladenosine-3'-phosphate
  modified_base 14: mod_base = OTHER; note = 2'-O-methyluridine-3'-phosphate
  modified_base 15: mod_base = OTHER; note = 2'-O-methyluridine-3'-phosphate
  modified_base 16: mod_base = OTHER; note = 2'-O-methyluridine-3'-phosphate
  modified_base 17: mod_base = OTHER; note = 2'-O-methylguanosine-3'-phosphate
  modified_base 18: mod_base = OTHER; note = 2'-O-methylguanosine-3'-phosphate
  modified_base 19: mod_base = OTHER; note = 2'-O-methylguanosine-3'-phosphate
  modified_base 20: mod_base = OTHER; note = 2'-O-methyluridine-3'-phosphate
  modified_base 21: mod_base = OTHER; note = 2'-O-methyluridine-3'-phosphate N-[tris(GalNAc-alkyl)-amidodecanoyl)]-4-hydroxyprolinol (Hyp-(GalNAc-alkyl)3)
tcaaagatgaggatttgggtt

SEQ ID NO: 924 - RNA, 21 nt, synthetic construct
  misc_feature 1..21: note = Description of Artificial Sequence: Synthetic oligonucleotide
  source 1..21: mol_type = other RNA
  modified_base 1: mod_base = OTHER; note = 2'-O-methylcytidine-3'-phosphorothioate
  modified_base 2: mod_base = OTHER; note = 2'-O-methylcytidine-3'-phosphorothioate
  modified_base 3: mod_base = OTHER; note = 2'-O-methyladenosine-3'-phosphate
  modified_base 4: mod_base = OTHER; note = 2'-O-methyladenosine-3'-phosphate
  modified_base 5: mod_base = OTHER; note = 2'-O-methylguanosine-3'-phosphate
  modified_base 6: mod_base = OTHER; note = 2'-O-methyladenosine-3'-phosphate
  modified_base 7: mod_base = OTHER; note = 2'-fluorouridine-3'-phosphate
  modified_base 8: mod_base = OTHER; note = 2'-O-methylcytidine-3'-phosphate
  modified_base 9: mod_base = OTHER; note = 2'-fluorouridine-3'-phosphate
  modified_base 10: mod_base = OTHER; note = 2'-fluorocytidine-3'-phosphate
  modified_base 11: mod_base = OTHER; note = 2'-fluoroadenosine-3'-phosphate
  modified_base 12: mod_base = OTHER; note = 2'-O-methylguanosine-3'-phosphate
  modified_base 13: mod_base = OTHER; note = 2'-O-methyluridine-3'-phosphate
  modified_base 14: mod_base = OTHER; note = 2'-O-methylcytidine-3'-phosphate
  modified_base 15: mod_base = OTHER; note = 2'-O-methyladenosine-3'-phosphate
  modified_base 16: mod_base = OTHER; note = 2'-O-methylcytidine-3'-phosphate
  modified_base 17: mod_base = OTHER; note = 2'-O-methyluridine-3'-phosphate
  modified_base 18: mod_base = OTHER; note = 2'-O-methylcytidine-3'-phosphate
  modified_base 19: mod_base = OTHER; note = 2'-O-methylguanosine-3'-phosphate
  modified_base 20: mod_base = OTHER; note = 2'-O-methylcytidine-3'-phosphate
  modified_base 21: mod_base = OTHER; note = 2'-O-methyluridine-3'-phosphate N-[tris(GalNAc-alkyl)-amidodecanoyl)]-4-hydroxyprolinol (Hyp-(GalNAc-alkyl)3)
ccaagatctcagtcactcgct

SEQ ID NO: 925 - RNA, 21 nt, synthetic construct
  misc_feature 1..21: note = Description of Artificial Sequence: Synthetic oligonucleotide
  source 1..21: mol_type = other RNA
  modified_base 1: mod_base = OTHER; note = 2'-O-methylguanosine-3'-phosphorothioate
  modified_base 2: mod_base = OTHER; note = 2'-O-methyluridine-3'-phosphorothioate
  modified_base 3: mod_base = OTHER; note = 2'-O-methylguanosine-3'-phosphate
  modified_base 4: mod_base = OTHER; note = 2'-O-methylcytidine-3'-phosphate
  modified_base 5: mod_base = OTHER; note = 2'-O-methyluridine-3'-phosphate
  modified_base 6: mod_base = OTHER; note = 2'-O-methyladenosine-3'-phosphate
  modified_base 7: mod_base = OTHER; note = 2'-fluoroguanosine-3'-phosphate
  modified_base 8: mod_base = OTHER; note = 2'-O-methyladenosine-3'-phosphate
  modified_base 9: mod_base = OTHER; note = 2'-fluorouridine-3'-phosphate
  modified_base 10: mod_base = OTHER; note = 2'-fluoroguanosine-3'-phosphate
  modified_base 11: mod_base = OTHER; note = 2'-fluoroguanosine-3'-phosphate
  modified_base 12: mod_base = OTHER; note = 2'-O-methyladenosine-3'-phosphate
  modified_base 13: mod_base = OTHER; note = 2'-O-methyluridine-3'-phosphate
  modified_base 14: mod_base = OTHER; note = 2'-O-methylcytidine-3'-phosphate
  modified_base 15: mod_base = OTHER; note = 2'-O-methyladenosine-3'-phosphate
  modified_base 16: mod_base = OTHER; note = 2'-O-methylguanosine-3'-phosphate
  modified_base 17: mod_base = OTHER; note = 2'-O-methyladenosine-3'-phosphate
  modified_base 18: mod_base = OTHER; note = 2'-O-methylcytidine-3'-phosphate
  modified_base 19: mod_base = OTHER; note = 2'-O-methyladenosine-3'-phosphate
  modified_base 20: mod_base = OTHER; note = 2'-O-methylguanosine-3'-phosphate
  modified_base 21: mod_base = OTHER; note = 2'-O-methyluridine-3'-phosphate N-[tris(GalNAc-alkyl)-amidodecanoyl)]-4-hydroxyprolinol (Hyp-(GalNAc-alkyl)3)
gtgctagatggatcagacagt

SEQ ID NO: 926 - RNA, 21 nt, synthetic construct
  misc_feature 1..21: note = Description of Artificial Sequence: Synthetic oligonucleotide
  source 1..21: mol_type = other RNA
  modified_base 1: mod_base = OTHER; note = 2'-O-methylcytidine-3'-phosphorothioate
  modified_base 2: mod_base = OTHER; note = 2'-O-methyladenosine-3'-phosphorothioate
  modified_base 3: mod_base = OTHER; note = 2'-O-methyladenosine-3'-phosphate
  modified_base 4: mod_base = OTHER; note = 2'-O-methyladenosine-3'-phosphate
  modified_base 5: mod_base = OTHER; note = 2'-O-methyluridine-3'-phosphate
  modified_base 6: mod_base = OTHER; note = 2'-O-methylcytidine-3'-phosphate
  modified_base 7: mod_base = OTHER; note = 2'-fluorouridine-3'-phosphate
  modified_base 8: mod_base = OTHER; note = 2'-O-methylcytidine-3'-phosphate
  modified_base 9: mod_base = OTHER; note = 2'-fluorouridine-3'-phosphate
  modified_base 10: mod_base = OTHER; note = 2'-fluoroguanosine-3'-phosphate
  modified_base 11: mod_base = OTHER; note = 2'-fluoroadenosine-3'-phosphate
  modified_base 12: mod_base = OTHER; note = 2'-O-methylguanosine-3'-phosphate
  modified_base 13: mod_base = OTHER; note = 2'-O-methyluridine-3'-phosphate
  modified_base 14: mod_base = OTHER; note = 2'-O-methylcytidine-3'-phosphate
  modified_base 15: mod_base = OTHER; note = 2'-O-methyluridine-3'-phosphate
  modified_base 16: mod_base = OTHER; note = 2'-O-methylcytidine-3'-phosphate
  modified_base 17: mod_base = OTHER; note = 2'-O-methyluridine-3'-phosphate
  modified_base 18: mod_base = OTHER; note = 2'-O-methylguanosine-3'-phosphate
  modified_base 19: mod_base = OTHER; note = 2'-O-methyluridine-3'-phosphate
  modified_base 20: mod_base = OTHER; note = 2'-O-methylguanosine-3'-phosphate
  modified_base 21: mod_base = OTHER; note = 2'-O-methyluridine-3'-phosphate N-[tris(GalNAc-alkyl)-amidodecanoyl)]-4-hydroxyprolinol (Hyp-(GalNAc-alkyl)3)
caaatctctgagtctctgtgt

SEQ ID NO: 927 - RNA, 21 nt, synthetic construct
  misc_feature 1..21: note = Description of Artificial Sequence: Synthetic oligonucleotide
  source 1..21: mol_type = other RNA
  modified_base 1: mod_base = OTHER; note = 2'-O-methyluridine-3'-phosphorothioate
  modified_base 2: mod_base = OTHER; note = 2'-O-methylguanosine-3'-phosphorothioate
  modified_base 3: mod_base = OTHER; note = 2'-O-methylcytidine-3'-phosphate
  modified_base 4: mod_base = OTHER; note = 2'-O-methyluridine-3'-phosphate
  modified_base 5: mod_base = OTHER; note = 2'-O-methyladenosine-3'-phosphate
  modified_base 6: mod_base = OTHER; note = 2'-O-methylguanosine-3'-phosphate
  modified_base 7: mod_base = OTHER; note = 2'-fluoroadenosine-3'-phosphate
  modified_base 8: mod_base = OTHER; note = 2'-O-methyluridine-3'-phosphate
  modified_base 9: mod_base = OTHER; note = 2'-fluoroguanosine-3'-phosphate
  modified_base 10: mod_base = OTHER; note = 2'-fluoroguanosine-3'-phosphate
  modified_base 11: mod_base = OTHER; note = 2'-fluoroadenosine-3'-phosphate
  modified_base 12: mod_base = OTHER; note = 2'-O-methyluridine-3'-phosphate
  modified_base 13: mod_base = OTHER; note = 2'-O-methylcytidine-3'-phosphate
  modified_base 14: mod_base = OTHER; note = 2'-O-methyladenosine-3'-phosphate
  modified_base 15: mod_base = OTHER; note = 2'-O-methylguanosine-3'-phosphate
  modified_base 16: mod_base = OTHER; note = 2'-O-methyladenosine-3'-phosphate
  modified_base 17: mod_base = OTHER; note = 2'-O-methylcytidine-3'-phosphate
  modified_base 18: mod_base = OTHER; note = 2'-O-methyladenosine-3'-phosphate
  modified_base 19: mod_base = OTHER; note = 2'-O-methylguanosine-3'-phosphate
  modified_base 20: mod_base = OTHER; note = 2'-O-methylcytidine-3'-phosphate
  modified_base 21: mod_base = OTHER; note = 2'-O-methyluridine-3'-phosphate N-[tris(GalNAc-alkyl)-amidodecanoyl)]-4-hydroxyprolinol (Hyp-(GalNAc-alkyl)3)
tgctagatggatcagacagct

SEQ ID NO: 928 - RNA, 21 nt, synthetic construct
  misc_feature 1..21: note = Description of Artificial Sequence: Synthetic oligonucleotide
  source 1..21: mol_type = other RNA
  modified_base 1: mod_base = OTHER; note = 2'-O-methylguanosine-3'-phosphorothioate
  modified_base 2: mod_base = OTHER; note = 2'-O-methyladenosine-3'-phosphorothioate
  modified_base 3: mod_base = OTHER; note = 2'-O-methylcytidine-3'-phosphate
  modified_base 4: mod_base = OTHER; note = 2'-O-methylcytidine-3'-phosphate
  modified_base 5: mod_base = OTHER; note = 2'-O-methyladenosine-3'-phosphate
  modified_base 6: mod_base = OTHER; note = 2'-O-methylcytidine-3'-phosphate
  modified_base 7: mod_base = OTHER; note = 2'-fluoroadenosine-3'-phosphate
  modified_base 8: mod_base = OTHER; note = 2'-O-methyladenosine-3'-phosphate
  modified_base 9: mod_base = OTHER; note = 2'-fluoroguanosine-3'-phosphate
  modified_base 10: mod_base = OTHER; note = 2'-fluorocytidine-3'-phosphate
  modified_base 11: mod_base = OTHER; note = 2'-fluorouridine-3'-phosphate
  modified_base 12: mod_base = OTHER; note = 2'-O-methylguanosine-3'-phosphate
  modified_base 13: mod_base = OTHER; note = 2'-O-methyladenosine-3'-phosphate
  modified_base 14: mod_base = OTHER; note = 2'-O-methyladenosine-3'-phosphate
  modified_base 15: mod_base = OTHER; note = 2'-O-methylguanosine-3'-phosphate
  modified_base 16: mod_base = OTHER; note = 2'-O-methyluridine-3'-phosphate
  modified_base 17: mod_base = OTHER; note = 2'-O-methylcytidine-3'-phosphate
  modified_base 18: mod_base = OTHER; note = 2'-O-methyladenosine-3'-phosphate
  modified_base 19: mod_base = OTHER; note = 2'-O-methylguanosine-3'-phosphate
  modified_base 20: mod_base = OTHER; note = 2'-O-methylguanosine-3'-phosphate
  modified_base 21: mod_base = OTHER; note = 2'-O-methyluridine-3'-phosphate N-[tris(GalNAc-alkyl)-amidodecanoyl)]-4-hydroxyprolinol (Hyp-(GalNAc-alkyl)3)
gaccacaagctgaagtcaggt

SEQ ID NO: 929 - RNA, 21 nt, synthetic construct
  misc_feature 1..21: note = Description of Artificial Sequence: Synthetic oligonucleotide
  source 1..21: mol_type = other RNA
  modified_base 1: mod_base = OTHER; note = 2'-O-methylguanosine-3'-phosphorothioate
  modified_base 2: mod_base = OTHER; note = 2'-O-methyluridine-3'-phosphorothioate
  modified_base 3: mod_base = OTHER; note = 2'-O-methyluridine-3'-phosphate
  modified_base 4: mod_base = OTHER; note = 2'-O-methyluridine-3'-phosphate
  modified_base 5: mod_base = OTHER; note = 2'-O-methyladenosine-3'-phosphate
  modified_base 6: mod_base = OTHER; note = 2'-O-methyladenosine-3'-phosphate
  modified_base 7: mod_base = OTHER; note = 2'-fluoroadenosine-3'-phosphate
  modified_base 8: mod_base = OTHER; note = 2'-O-methylguanosine-3'-phosphate
  modified_base 9: mod_base = OTHER; note = 2'-fluorouridine-3'-phosphate
  modified_base 10: mod_base = OTHER; note = 2'-fluorocytidine-3'-phosphate
  modified_base 11: mod_base = OTHER; note = 2'-fluoroadenosine-3'-phosphate
  modified_base 12: mod_base = OTHER; note = 2'-O-methyladenosine-3'-phosphate
  modified_base 13: mod_base = OTHER; note = 2'-O-methylguanosine-3'-phosphate
  modified_base 14: mod_base = OTHER; note = 2'-O-methylguanosine-3'-phosphate
  modified_base 15: mod_base = OTHER; note = 2'-O-methyladenosine-3'-phosphate
  modified_base 16: mod_base = OTHER; note = 2'-O-methyluridine-3'-phosphate
  modified_base 17: mod_base = OTHER; note = 2'-O-methyladenosine-3'-phosphate
  modified_base 18: mod_base = OTHER; note = 2'-O-methyluridine-3'-phosphate
  modified_base 19: mod_base = OTHER; note = 2'-O-methylguanosine-3'-phosphate
  modified_base 20: mod_base = OTHER; note = 2'-O-methylguanosine-3'-phosphate
  modified_base 21: mod_base = OTHER; note = 2'-O-methyluridine-3'-phosphate N-[tris(GalNAc-alkyl)-amidodecanoyl)]-4-hydroxyprolinol (Hyp-(GalNAc-alkyl)3)
gtttaaagtcaaggatatggt

SEQ ID NO: 930 - RNA, 21 nt, synthetic construct
  misc_feature 1..21: note = Description of Artificial Sequence: Synthetic oligonucleotide
  source 1..21: mol_type = other RNA
  modified_base 1: mod_base = OTHER; note = 2'-O-methyladenosine-3'-phosphorothioate
  modified_base 2: mod_base = OTHER; note = 2'-O-methylguanosine-3'-phosphorothioate
  modified_base 3: mod_base = OTHER; note = 2'-O-methylcytidine-3'-phosphate
  modified_base 4: mod_base = OTHER; note = 2'-O-methyluridine-3'-phosphate
  modified_base 5: mod_base = OTHER; note = 2'-O-methylcytidine-3'-phosphate
  modified_base 6: mod_base = OTHER; note = 2'-O-methyladenosine-3'-phosphate
  modified_base 7: mod_base = OTHER; note = 2'-fluoroadenosine-3'-phosphate
  modified_base 8: mod_base = OTHER; note = 2'-O-methyladenosine-3'-phosphate
  modified_base 9: mod_base = OTHER; note = 2'-fluoroguanosine-3'-phosphate
  modified_base 10: mod_base = OTHER; note = 2'-fluoroadenosine-3'-phosphate
  modified_base 11: mod_base = OTHER; note = 2'-fluorouridine-3'-phosphate
  modified_base 12: mod_base = OTHER; note = 2'-O-methylguanosine-3'-phosphate
  modified_base 13: mod_base = OTHER; note = 2'-O-methyladenosine-3'-phosphate
  modified_base 14: mod_base = OTHER; note = 2'-O-methylguanosine-3'-phosphate
  modified_base 15: mod_base = OTHER; note = 2'-O-methylguanosine-3'-phosphate
  modified_base 16: mod_base = OTHER; note = 2'-O-methyladenosine-3'-phosphate
  modified_base 17: mod_base = OTHER; note = 2'-O-methyluridine-3'-phosphate
  modified_base 18: mod_base = OTHER; note = 2'-O-methyluridine-3'-phosphate
  modified_base 19: mod_base = OTHER; note = 2'-O-methyluridine-3'-phosphate
  modified_base 20: mod_base = OTHER; note = 2'-O-methylguanosine-3'-phosphate
  modified_base 21: mod_base = OTHER; note = 2'-O-methyluridine-3'-phosphate N-[tris(GalNAc-alkyl)-amidodecanoyl)]-4-hydroxyprolinol (Hyp-(GalNAc-alkyl)3)
agctcaaagatgaggatttgt

SEQ ID NO: 931 - RNA, 21 nt, synthetic construct
  misc_feature 1..21: note = Description of Artificial Sequence: Synthetic oligonucleotide
  source 1..21: mol_type = other RNA
  modified_base 1: mod_base = OTHER; note = 2'-O-methylguanosine-3'-phosphorothioate
  modified_base 2: mod_base = OTHER; note = 2'-O-methyladenosine-3'-phosphorothioate
  modified_base 3: mod_base = OTHER; note = 2'-O-methylguanosine-3'-phosphate
  modified_base 4: mod_base = OTHER; note = 2'-O-methylguanosine-3'-phosphate
  modified_base 5: mod_base = OTHER; note = 2'-O-methylguanosine-3'-phosphate
  modified_base 6: mod_base = OTHER; note = 2'-O-methyladenosine-3'-phosphate
  modified_base 7: mod_base = OTHER; note = 2'-fluoroguanosine-3'-phosphate
  modified_base 8: mod_base = OTHER; note = 2'-O-methyluridine-3'-phosphate
  modified_base 9: mod_base = OTHER; note = 2'-fluoroadenosine-3'-phosphate
  modified_base 10: mod_base = OTHER; note = 2'-fluoroguanosine-3'-phosphate
  modified_base 11: mod_base = OTHER; note = 2'-fluoroadenosine-3'-phosphate
  modified_base 12: mod_base = OTHER; note = 2'-O-methylguanosine-3'-phosphate
  modified_base 13: mod_base = OTHER; note = 2'-O-methyladenosine-3'-phosphate
  modified_base 14: mod_base = OTHER; note = 2'-O-methyluridine-3'-phosphate
  modified_base 15: mod_base = OTHER; note = 2'-O-methylcytidine-3'-phosphate
  modified_base 16: mod_base = OTHER; note = 2'-O-methyladenosine-3'-phosphate
  modified_base 17: mod_base = OTHER; note = 2'-O-methyladenosine-3'-phosphate
  modified_base 18: mod_base = OTHER; note = 2'-O-methyladenosine-3'-phosphate
  modified_base 19: mod_base = OTHER; note = 2'-O-methylguanosine-3'-phosphate
  modified_base 20: mod_base = OTHER; note = 2'-O-methylguanosine-3'-phosphate
  modified_base 21: mod_base = OTHER; note = 2'-O-methyluridine-3'-phosphate N-[tris(GalNAc-alkyl)-amidodecanoyl)]-4-hydroxyprolinol (Hyp-(GalNAc-alkyl)3)
gagggagtagagatcaaaggt

SEQ ID NO: 932 - RNA, 21 nt, synthetic construct
  misc_feature 1..21: note = Description of Artificial Sequence: Synthetic oligonucleotide
  source 1..21: mol_type = other RNA
  modified_base 1: mod_base = OTHER; note = 2'-O-methyluridine-3'-phosphorothioate
  modified_base 2: mod_base = OTHER; note = 2'-O-methylcytidine-3'-phosphorothioate
  modified_base 3: mod_base = OTHER; note = 2'-O-methyluridine-3'-phosphate
  modified_base 4: mod_base = OTHER; note = 2'-O-methyladenosine-3'-phosphate
  modified_base 5: mod_base = OTHER; note = 2'-O-methylcytidine-3'-phosphate
  modified_base 6: mod_base = OTHER; note = 2'-O-methylcytidine-3'-phosphate
  modified_base 7: mod_base = OTHER; note = 2'-fluoroadenosine-3'-phosphate
  modified_base 8: mod_base = OTHER; note = 2'-O-methyladenosine-3'-phosphate
  modified_base 9: mod_base = OTHER; note = 2'-fluoroadenosine-3'-phosphate
  modified_base 10: mod_base = OTHER; note = 2'-fluorouridine-3'-phosphate
  modified_base 11: mod_base = OTHER; note = 2'-fluoroguanosine-3'-phosphate
  modified_base 12: mod_base = OTHER; note = 2'-O-methyladenosine-3'-phosphate
  modified_base 13: mod_base = OTHER; note = 2'-O-methyluridine-3'-phosphate
  modified_base 14: mod_base = OTHER; note = 2'-O-methyluridine-3'-phosphate
  modified_base 15: mod_base = OTHER; note = 2'-O-methylguanosine-3'-phosphate
  modified_base 16: mod_base = OTHER; note = 2'-O-methyladenosine-3'-phosphate
  modified_base 17: mod_base = OTHER; note = 2'-O-methyluridine-3'-phosphate
  modified_base 18: mod_base = OTHER; note = 2'-O-methylguanosine-3'-phosphate
  modified_base 19: mod_base = OTHER; note = 2'-O-methyladenosine-3'-phosphate
  modified_base 20: mod_base = OTHER; note = 2'-O-methyladenosine-3'-phosphate
  modified_base 21: mod_base = OTHER; note = 2'-O-methyluridine-3'-phosphate N-[tris(GalNAc-alkyl)-amidodecanoyl)]-4-hydroxyprolinol (Hyp-(GalNAc-alkyl)3)
tctaccaaatgattgatgaat

SEQ ID NO: 933 - RNA, 21 nt, synthetic construct
  misc_feature 1..21: note = Description of Artificial Sequence: Synthetic oligonucleotide
  source 1..21: mol_type = other RNA
  modified_base 1: mod_base = OTHER; note = 2'-O-methylcytidine-3'-phosphorothioate
  modified_base 2: mod_base = OTHER; note = 2'-O-methyluridine-3'-phosphorothioate
  modified_base 3: mod_base = OTHER; note = 2'-O-methylcytidine-3'-phosphate
  modified_base 4: mod_base = OTHER; note = 2'-O-methyladenosine-3'-phosphate
  modified_base 5: mod_base = OTHER; note = 2'-O-methyladenosine-3'-phosphate
  modified_base 6: mod_base = OTHER; note = 2'-O-methyladenosine-3'-phosphate
  modified_base 7: mod_base = OTHER; note = 2'-fluoroguanosine-3'-phosphate
  modified_base 8: mod_base = OTHER; note = 2'-O-methyladenosine-3'-phosphate
  modified_base 9: mod_base = OTHER; note = 2'-fluorouridine-3'-phosphate
  modified_base 10: mod_base = OTHER; note = 2'-fluoroguanosine-3'-phosphate
  modified_base 11: mod_base = OTHER; note = 2'-fluoroadenosine-3'-phosphate
  modified_base 12: mod_base = OTHER; note = 2'-O-methylguanosine-3'-phosphate
  modified_base 13: mod_base = OTHER; note = 2'-O-methylguanosine-3'-phosphate
  modified_base 14: mod_base = OTHER; note = 2'-O-methyladenosine-3'-phosphate
  modified_base 15: mod_base = OTHER; note = 2'-O-methyluridine-3'-phosphate
  modified_base 16: mod_base = OTHER; note = 2'-O-methyluridine-3'-phosphate
  modified_base 17: mod_base = OTHER; note = 2'-O-methyluridine-3'-phosphate
  modified_base 18: mod_base = OTHER; note = 2'-O-methylguanosine-3'-phosphate
  modified_base 19: mod_base = OTHER; note = 2'-O-methylguanosine-3'-phosphate
  modified_base 20: mod_base = OTHER; note = 2'-O-methylguanosine-3'-phosphate
  modified_base 21: mod_base = OTHER; note = 2'-O-methyluridine-3'-phosphate N-[tris(GalNAc-alkyl)-amidodecanoyl)]-4-hydroxyprolinol (Hyp-(GalNAc-alkyl)3)
ctcaaagatgaggatttgggt

SEQ ID NO: 934 - RNA, 21 nt, synthetic construct
  misc_feature 1..21: note = Description of Artificial Sequence: Synthetic oligonucleotide
  source 1..21: mol_type = other RNA
  modified_base 1: mod_base = OTHER; note = 2'-O-methylcytidine-3'-phosphorothioate
  modified_base 2: mod_base = OTHER; note = 2'-O-methyluridine-3'-phosphorothioate
  modified_base 3: mod_base = OTHER; note = 2'-O-methylguanosine-3'-phosphate
  modified_base 4: mod_base = OTHER; note = 2'-O-methylcytidine-3'-phosphate
  modified_base 5: mod_base = OTHER; note = 2'-O-methylcytidine-3'-phosphate
  modified_base 6: mod_base = OTHER; note = 2'-O-methyladenosine-3'-phosphate
  modified_base 7: mod_base = OTHER; note = 2'-fluoroadenosine-3'-phosphate
  modified_base 8: mod_base = OTHER; note = 2'-O-methylguanosine-3'-phosphate
  modified_base 9: mod_base = OTHER; note = 2'-fluoroadenosine-3'-phosphate
  modified_base 10: mod_base = OTHER; note = 2'-fluorouridine-3'-phosphate
  modified_base 11: mod_base = OTHER; note = 2'-fluorouridine-3'-phosphate
  modified_base 12: mod_base = OTHER; note = 2'-O-methylcytidine-3'-phosphate
  modified_base 13: mod_base = OTHER; note = 2'-O-methylcytidine-3'-phosphate
  modified_base 14: mod_base = OTHER; note = 2'-O-methyluridine-3'-phosphate
  modified_base 15: mod_base = OTHER; note = 2'-O-methyluridine-3'-phosphate
  modified_base 16: mod_base = OTHER; note = 2'-O-methylcytidine-3'-phosphate
  modified_base 17: mod_base = OTHER; note = 2'-O-methyladenosine-3'-phosphate
  modified_base 18: mod_base = OTHER; note = 2'-O-methyluridine-3'-phosphate
  modified_base 19: mod_base = OTHER; note = 2'-O-methylguanosine-3'-phosphate
  modified_base 20: mod_base = OTHER; note = 2'-O-methyluridine-3'-phosphate
  modified_base 21: mod_base = OTHER; note = 2'-O-methyluridine-3'-phosphate N-[tris(GalNAc-alkyl)-amidodecanoyl)]-4-hydroxyprolinol (Hyp-(GalNAc-alkyl)3)
ctgccaagattccttcatgtt

SEQ ID NO: 935 - RNA, 21 nt, synthetic construct
  misc_feature 1..21: note = Description of Artificial Sequence: Synthetic oligonucleotide
  source 1..21: mol_type = other RNA
  modified_base 1: mod_base = OTHER; note = 2'-O-methyladenosine-3'-phosphorothioate
  modified_base 2: mod_base = OTHER; note = 2'-O-methyluridine-3'-phosphorothioate
  modified_base 3: mod_base = OTHER; note = 2'-O-methylguanosine-3'-phosphate
  modified_base 4: mod_base = OTHER; note = 2'-O-methylguanosine-3'-phosphate
  modified_base 5: mod_base = OTHER; note = 2'-O-methylcytidine-3'-phosphate
  modified_base 6: mod_base = OTHER; note = 2'-O-methyladenosine-3'-phosphate
  modified_base 7: mod_base = OTHER; note = 2'-fluoroadenosine-3'-phosphate
  modified_base 8: mod_base = OTHER; note = 2'-O-methylguanosine-3'-phosphate
  modified_base 9: mod_base = OTHER; note = 2'-fluorocytidine-3'-phosphate
  modified_base 10: mod_base = OTHER; note = 2'-fluorocytidine-3'-phosphate
  modified_base 11: mod_base = OTHER; note = 2'-fluoroadenosine-3'-phosphate
  modified_base 12: mod_base = OTHER; note = 2'-O-methyladenosine-3'-phosphate
  modified_base 13: mod_base = OTHER; note = 2'-O-methylguanosine-3'-phosphate
  modified_base 14: mod_base = OTHER; note = 2'-O-methyladenosine-3'-phosphate
  modified_base 15: mod_base = OTHER; note = 2'-O-methyluridine-3'-phosphate
  modified_base 16: mod_base = OTHER; note = 2'-O-methylcytidine-3'-phosphate
  modified_base 17: mod_base = OTHER; note = 2'-O-methyluridine-3'-phosphate
  modified_base 18: mod_base = OTHER; note = 2'-O-methylcytidine-3'-phosphate
  modified_base 19: mod_base = OTHER; note = 2'-O-methyladenosine-3'-phosphate
  modified_base 20: mod_base = OTHER; note = 2'-O-methylguanosine-3'-phosphate
  modified_base 21: mod_base = OTHER; note = 2'-O-methyluridine-3'-phosphate N-[tris(GalNAc-alkyl)-amidodecanoyl)]-4-hydroxyprolinol (Hyp-(GalNAc-alkyl)3)
atggcaagccaagatctcagt

SEQ ID NO: 936 - RNA, 21 nt, synthetic construct
  misc_feature 1..21: note = Description of Artificial Sequence: Synthetic oligonucleotide
  source 1..21: mol_type = other RNA
  modified_base 1: mod_base = OTHER; note = 2'-O-methylcytidine-3'-phosphorothioate
  modified_base 2: mod_base = OTHER; note = 2'-O-methylcytidine-3'-phosphorothioate
  modified_base 3: mod_base = OTHER; note = 2'-O-methyluridine-3'-phosphate
  modified_base 4: mod_base = OTHER; note = 2'-O-methylguanosine-3'-phosphate
  modified_base 5: mod_base = OTHER; note = 2'-O-methylguanosine-3'-phosphate
  modified_base 6: mod_base = OTHER; note = 2'-O-methyladenosine-3'-phosphate
  modified_base 7: mod_base = OTHER; note = 2'-fluorouridine-3'-phosphate
  modified_base 8: mod_base = OTHER; note = 2'-O-methylguanosine-3'-phosphate
  modified_base 9: mod_base = OTHER; note = 2'-fluorouridine-3'-phosphate
  modified_base 10: mod_base = OTHER; note = 2'-fluoroguanosine-3'-phosphate
  modified_base 11: mod_base = OTHER; note = 2'-fluorouridine-3'-phosphate
  modified_base 12: mod_base = OTHER; note = 2'-O-methyladenosine-3'-phosphate
  modified_base 13: mod_base = OTHER; note = 2'-O-methyluridine-3'-phosphate
  modified_base 14: mod_base = OTHER; note = 2'-O-methylguanosine-3'-phosphate
  modified_base 15: mod_base = OTHER; note = 2'-O-methyluridine-3'-phosphate
  modified_base 16: mod_base = OTHER; note = 2'-O-methylguanosine-3'-phosphate
  modified_base 17: mod_base = OTHER; note = 2'-O-methyluridine-3'-phosphate
  modified_base 18: mod_base = OTHER; note = 2'-O-methyluridine-3'-phosphate
  modified_base 19: mod_base = OTHER; note = 2'-O-methyluridine-3'-phosphate
  modified_base 20: mod_base = OTHER; note = 2'-O-methylguanosine-3'-phosphate
  modified_base 21: mod_base = OTHER; note = 2'-O-methyluridine-3'-phosphate N-[tris(GalNAc-alkyl)-amidodecanoyl)]-4-hydroxyprolinol (Hyp-(GalNAc-alkyl)3)
cctggatgtgtatgtgtttgt

SEQ ID NO: 937 - RNA, 21 nt, synthetic construct
  misc_feature 1..21: note = Description of Artificial Sequence: Synthetic oligonucleotide
  source 1..21: mol_type = other RNA
  modified_base 1: mod_base = OTHER; note = 2'-O-methyluridine-3'-phosphorothioate
  modified_base 2: mod_base = OTHER; note = 2'-O-methylguanosine-3'-phosphorothioate
  modified_base 3: mod_base = OTHER; note = 2'-O-methyluridine-3'-phosphate
  modified_base 4: mod_base = OTHER; note = 2'-O-methyluridine-3'-phosphate
  modified_base 5: mod_base = OTHER; note = 2'-O-methyluridine-3'-phosphate
  modified_base 6: mod_base = OTHER; note = 2'-O-methyladenosine-3'-phosphate
  modified_base 7: mod_base = OTHER; note = 2'-fluoroadenosine-3'-phosphate
  modified_base 8: mod_base = OTHER; note = 2'-O-methyladenosine-3'-phosphate
  modified_base 9: mod_base = OTHER; note = 2'-fluoroguanosine-3'-phosphate
  modified_base 10: mod_base = OTHER; note = 2'-fluorouridine-3'-phosphate
  modified_base 11: mod_base = OTHER; note = 2'-fluorocytidine-3'-phosphate
  modified_base 12: mod_base = OTHER; note = 2'-O-methyladenosine-3'-phosphate
  modified_base 13: mod_base = OTHER; note = 2'-O-methyladenosine-3'-phosphate
  modified_base 14: mod_base = OTHER; note = 2'-O-methylguanosine-3'-phosphate
  modified_base 15: mod_base = OTHER; note = 2'-O-methylguanosine-3'-phosphate
  modified_base 16: mod_base = OTHER; note = 2'-O-methyladenosine-3'-phosphate
  modified_base 17: mod_base = OTHER; note = 2'-O-methyluridine-3'-phosphate
  modified_base 18: mod_base = OTHER; note = 2'-O-methyladenosine-3'-phosphate
  modified_base 19: mod_base = OTHER; note = 2'-O-methyluridine-3'-phosphate
  modified_base 20: mod_base = OTHER; note = 2'-O-methylguanosine-3'-phosphate
  modified_base 21: mod_base = OTHER; note = 2'-O-methyluridine-3'-phosphate N-[tris(GalNAc-alkyl)-amidodecanoyl)]-4-hydroxyprolinol (Hyp-(GalNAc-alkyl)3)
tgtttaaagtcaaggatatgt

SEQ ID NO: 938 - RNA, 21 nt, synthetic construct
  misc_feature 1..21: note = Description of Artificial Sequence: Synthetic oligonucleotide
  source 1..21: mol_type = other RNA
  modified_base 1: mod_base = OTHER; note = 2'-O-methylguanosine-3'-phosphorothioate
  modified_base 2: mod_base = OTHER; note = 2'-O-methylcytidine-3'-phosphorothioate
  modified_base 3: mod_base = OTHER; note = 2'-O-methylcytidine-3'-phosphate
  modified_base 4: mod_base = OTHER; note = 2'-O-methylguanosine-3'-phosphate
  modified_base 5: mod_base = OTHER; note = 2'-O-methylcytidine-3'-phosphate
  modified_base 6: mod_base = OTHER; note = 2'-O-methyluridine-3'-phosphate
  modified_base 7: mod_base = OTHER; note = 2'-fluorouridine-3'-phosphate
  modified_base 8: mod_base = OTHER; note = 2'-O-methylcytidine-3'-phosphate
  modified_base 9: mod_base = OTHER; note = 2'-fluoroadenosine-3'-phosphate
  modified_base 10: mod_base = OTHER; note = 2'-fluorouridine-3'-phosphate
  modified_base 11: mod_base = OTHER; note = 2'-fluorouridine-3'-phosphate
  modified_base 12: mod_base = OTHER; note = 2'-O-methylcytidine-3'-phosphate
  modified_base 13: mod_base = OTHER; note = 2'-O-methyladenosine-3'-phosphate
  modified_base 14: mod_base = OTHER; note = 2'-O-methyladenosine-3'-phosphate
  modified_base 15: mod_base = OTHER; note = 2'-O-methylguanosine-3'-phosphate
  modified_base 16: mod_base = OTHER; note = 2'-O-methyluridine-3'-phosphate
  modified_base 17: mod_base = OTHER; note = 2'-O-methyluridine-3'-phosphate
  modified_base 18: mod_base = OTHER; note = 2'-O-methylguanosine-3'-phosphate
  modified_base 19: mod_base = OTHER; note = 2'-O-methylguanosine-3'-phosphate
  modified_base 20: mod_base = OTHER; note = 2'-O-methyluridine-3'-phosphate
  modified_base 21: mod_base = OTHER; note = 2'-O-methyluridine-3'-phosphate N-[tris(GalNAc-alkyl)-amidodecanoyl)]-4-hydroxyprolinol (Hyp-(GalNAc-alkyl)3)
gccgcttcattcaagttggtt

SEQ ID NO: 939 - RNA, 23 nt, synthetic construct
  misc_feature 1..23: note = Description of Artificial Sequence: Synthetic oligonucleotide
  source 1..23: mol_type = other RNA
  modified_base 1: mod_base = OTHER; note = 2'-O-methyladenosine-3'-phosphorothioate
  modified_base 2: mod_base = OTHER; note = 2'-fluorouridine -3'-phosphorothioate
  modified_base 3: mod_base = OTHER; note = 2'-O-methyladenosine-3'-phosphate
  modified_base 4: mod_base = OTHER; note = 2'-O-methylcytidine-3'-phosphate
  modified_base 5: mod_base = OTHER; note = 2'-O-methyladenosine-3'-phosphate
  modified_base 6: mod_base = OTHER; note = 2'-O-methyluridine-3'-phosphate
  modified_base 7: mod_base = OTHER; note = Guanosine-glycol nucleic acid (GNA)
  modified_base 8: mod_base = OTHER; note = 2'-O-methyladenosine-3'-phosphate
  modified_base 9: mod_base = OTHER; note = 2'-O-methyladenosine-3'-phosphate
  modified_base 10: mod_base = OTHER; note = 2'-O-methylguanosine-3'-phosphate
  modified_base 11: mod_base = OTHER; note = 2'-O-methylguanosine-3'-phosphate
  modified_base 12: mod_base = OTHER; note = 2'-O-methyladenosine-3'-phosphate
  modified_base 13: mod_base = OTHER; note = 2'-O-methyladenosine-3'-phosphate
  modified_base 14: mod_base = OTHER; note = 2'-fluorouridine-3'-phosphate
  modified_base 15: mod_base = OTHER; note = 2'-O-methylcytidine-3'-phosphate
  modified_base 16: mod_base = OTHER; note = 2'-fluorouridine-3'-phosphate
  modified_base 17: mod_base = OTHER; note = 2'-O-methyluridine-3'-phosphate
  modified_base 18: mod_base = OTHER; note = 2'-O-methylguanosine-3'-phosphate
  modified_base 19: mod_base = OTHER; note = 2'-O-methylguanosine-3'-phosphate
  modified_base 20: mod_base = OTHER; note = 2'-O-methylcytidine-3'-phosphate
  modified_base 21: mod_base = OTHER; note = 2'-O-methyladenosine-3'-phosphorothioate
  modified_base 22: mod_base = OTHER; note = 2'-O-methylguanosine-3'-phosphorothioate
  modified_base 23: mod_base = OTHER; note = 2'-O-methylguanosine-3'-phosphate
atacatgaaggaatcttggcagg

SEQ ID NO: 940 - DNA, 23 bp, synthetic construct
  misc_feature 1..23: note = Description of Artificial Sequence: Synthetic oligonucleotide
  source 1..23: mol_type = other DNA
  modified_base 1: mod_base = OTHER; note = 2'-O-methyladenosine-3'-phosphorothioate
  modified_base 2: mod_base = OTHER; note = 2'-fluoroadenosine-3'-phosphorothioate
  modified_base 3: mod_base = OTHER; note = 2'-O-methyluridine-3'-phosphate
  modified_base 4: mod_base = OTHER; note = 2'-O-methylcytidine-3'-phosphate
  modified_base 5: mod_base = OTHER; note = 2'-O-methylcytidine-3'-phosphate
  modified_base 6: mod_base = OTHER; note = 2'-O-methyluridine-3'-phosphate
  modified_base 7: mod_base = OTHER; note = Thymidine-glycol nucleic acid (GNA) S-Isomer
  modified_base 8: mod_base = OTHER; note = 2'-O-methylguanosine-3'-phosphate
  modified_base 9: mod_base = OTHER; note = 2'-O-methyladenosine-3'-phosphate
  modified_base 10: mod_base = OTHER; note = 2'-O-methylcytidine-3'-phosphate
  modified_base 11: mod_base = OTHER; note = 2'-O-methyluridine-3'-phosphate
  modified_base 12: mod_base = OTHER; note = 2'-O-methyluridine-3'-phosphate
  modified_base 13: mod_base = OTHER; note = 2'-O-methyluridine-3'-phosphate
  modified_base 14: mod_base = OTHER; note = 2'-fluoroadenosine-3'-phosphate
  modified_base 15: mod_base = OTHER; note = 2'-O-methyladenosine-3'-phosphate
  modified_base 16: mod_base = OTHER; note = 2'-fluoroadenosine-3'-phosphate
  modified_base 17: mod_base = OTHER; note = 2'-O-methylcytidine-3'-phosphate
  modified_base 18: mod_base = OTHER; note = 2'-O-methyladenosine-3'-phosphate
  modified_base 19: mod_base = OTHER; note = 2'-O-methylcytidine-3'-phosphate
  modified_base 20: mod_base = OTHER; note = 2'-O-methyladenosine-3'-phosphate
  modified_base 21: mod_base = OTHER; note = 2'-O-methyluridine-3'-phosphorothioate
  modified_base 22: mod_base = OTHER; note = 2'-O-methylguanosine-3'-phosphorothioate
  modified_base 23: mod_base = OTHER; note = 2'-O-methyladenosine-3'-phosphate
  misc_feature 1..6: note = RNA
  misc_feature 7: note = DNA
  misc_feature 8..23: note = RNA
aatccttgactttaaacacatga

SEQ ID NO: 941 - RNA, 23 nt, synthetic construct
  misc_feature 1..23: note = Description of Artificial Sequence: Synthetic oligonucleotide
  source 1..23: mol_type = other RNA
  modified_base 1: mod_base = OTHER; note = 2'-O-methyladenosine-3'-phosphorothioate
  modified_base 2: mod_base = OTHER; note = 2'-fluoroadenosine-3'-phosphorothioate
  modified_base 3: mod_base = OTHER; note = 2'-O-methyladenosine-3'-phosphate
  modified_base 4: mod_base = OTHER; note = 2'-O-methyladenosine-3'-phosphate
  modified_base 5: mod_base = OTHER; note = 2'-O-methylcytidine-3'-phosphate
  modified_base 6: mod_base = OTHER; note = 2'-O-methylcytidine-3'-phosphate
  modified_base 7: mod_base = OTHER; note = Cytidine-glycol nucleic acid (GNA)
  modified_base 8: mod_base = OTHER; note = 2'-O-methyladenosine-3'-phosphate
  modified_base 9: mod_base = OTHER; note = 2'-O-methyladenosine-3'-phosphate
  modified_base 10: mod_base = OTHER; note = 2'-O-methyladenosine-3'-phosphate
  modified_base 11: mod_base = OTHER; note = 2'-O-methyluridine-3'-phosphate
  modified_base 12: mod_base = OTHER; note = 2'-O-methylcytidine-3'-phosphate
  modified_base 13: mod_base = OTHER; note = 2'-O-methylcytidine-3'-phosphate
  modified_base 14: mod_base = OTHER; note = 2'-fluorouridine-3'-phosphate
  modified_base 15: mod_base = OTHER; note = 2'-O-methylcytidine-3'-phosphate
  modified_base 16: mod_base = OTHER; note = 2'-fluoroadenosine-3'-phosphate
  modified_base 17: mod_base = OTHER; note = 2'-O-methyluridine-3'-phosphate
  modified_base 18: mod_base = OTHER; note = 2'-O-methylcytidine-3'-phosphate
  modified_base 19: mod_base = OTHER; note = 2'-O-methyluridine-3'-phosphate
  modified_base 20: mod_base = OTHER; note = 2'-O-methyluridine-3'-phosphate
  modified_base 21: mod_base = OTHER; note = 2'-O-methyluridine-3'-phosphorothioate
  modified_base 22: mod_base = OTHER; note = 2'-O-methylguanosine-3'-phosphorothioate
  modified_base 23: mod_base = OTHER; note = 2'-O-methyladenosine-3'-phosphate
aaaacccaaatcctcatctttga

SEQ ID NO: 942 - RNA, 23 nt, synthetic construct
  misc_feature 1..23: note = Description of Artificial Sequence: Synthetic oligonucleotide
  source 1..23: mol_type = other RNA
  modified_base 1: mod_base = OTHER; note = 2'-O-methyladenosine-3'-phosphorothioate
  modified_base 2: mod_base = OTHER; note = 2'-fluoroadenosine-3'-phosphorothioate
  modified_base 3: mod_base = OTHER; note = 2'-O-methyladenosine-3'-phosphate
  modified_base 4: mod_base = OTHER; note = 2'-O-methylcytidine-3'-phosphate
  modified_base 5: mod_base = OTHER; note = 2'-O-methyladenosine-3'-phosphate
  modified_base 6: mod_base = OTHER; note = 2'-O-methylguanosine-3'-phosphate
  modified_base 7: mod_base = OTHER; note = Adenosine-glycol nucleic acid (GNA)
  modified_base 8: mod_base = OTHER; note = 2'-O-methylguanosine-3'-phosphate
  modified_base 9: mod_base = OTHER; note = 2'-O-methylcytidine-3'-phosphate
  modified_base 10: mod_base = OTHER; note = 2'-O-methyluridine-3'-phosphate
  modified_base 11: mod_base = OTHER; note = 2'-O-methyluridine-3'-phosphate
  modified_base 12: mod_base = OTHER; note = 2'-O-methyluridine-3'-phosphate
  modified_base 13: mod_base = OTHER; note = 2'-O-methylguanosine-3'-phosphate
  modified_base 14: mod_base = OTHER; note = 2'-fluoroadenosine-3'-phosphate
  modified_base 15: mod_base = OTHER; note = 2'-O-methylcytidine-3'-phosphate
  modified_base 16: mod_base = OTHER; note = 2'-fluoroadenosine-3'-phosphate
  modified_base 17: mod_base = OTHER; note = 2'-O-methyluridine-3'-phosphate
  modified_base 18: mod_base = OTHER; note = 2'-O-methylcytidine-3'-phosphate
  modified_base 19: mod_base = OTHER; note = 2'-O-methylcytidine-3'-phosphate
  modified_base 20: mod_base = OTHER; note = 2'-O-methyluridine-3'-phosphate
  modified_base 21: mod_base = OTHER; note = 2'-O-methyluridine-3'-phosphorothioate
  modified_base 22: mod_base = OTHER; note = 2'-O-methylcytidine-3'-phosphorothioate
  modified_base 23: mod_base = OTHER; note = 2'-O-methyladenosine-3'-phosphate
aaacagagctttgacatccttca

SEQ ID NO: 943 - DNA, 23 bp, synthetic construct
  misc_feature 1..23: note = Description of Artificial Sequence: Synthetic oligonucleotide
  source 1..23: mol_type = other DNA
  modified_base 1: mod_base = OTHER; note = 2'-O-methyladenosine-3'-phosphorothioate
  modified_base 2: mod_base = OTHER; note = 2'-fluorouridine -3'-phosphorothioate
  modified_base 3: mod_base = OTHER; note = 2'-O-methyluridine-3'-phosphate
  modified_base 4: mod_base = OTHER; note = 2'-O-methyluridine-3'-phosphate
  modified_base 5: mod_base = OTHER; note = 2'-O-methylcytidine-3'-phosphate
  modified_base 6: mod_base = OTHER; note = 2'-O-methyladenosine-3'-phosphate
  modified_base 7: mod_base = OTHER; note = Thymidine-glycol nucleic acid (GNA) S-Isomer
  modified_base 8: mod_base = OTHER; note = 2'-O-methylcytidine-3'-phosphate
  modified_base 9: mod_base = OTHER; note = 2'-O-methyladenosine-3'-phosphate
  modified_base 10: mod_base = OTHER; note = 2'-O-methyladenosine-3'-phosphate
  modified_base 11: mod_base = OTHER; note = 2'-O-methyluridine-3'-phosphate
  modified_base 12: mod_base = OTHER; note = 2'-O-methylcytidine-3'-phosphate
  modified_base 13: mod_base = OTHER; note = 2'-O-methyladenosine-3'-phosphate
  modified_base 14: mod_base = OTHER; note = 2'-fluorouridine-3'-phosphate
  modified_base 15: mod_base = OTHER; note = 2'-O-methyluridine-3'-phosphate
  modified_base 16: mod_base = OTHER; note = 2'-fluorouridine-3'-phosphate
  modified_base 17: mod_base = OTHER; note = 2'-O-methylguanosine-3'-phosphate
  modified_base 18: mod_base = OTHER; note = 2'-O-methylguanosine-3'-phosphate
  modified_base 19: mod_base = OTHER; note = 2'-O-methyluridine-3'-phosphate
  modified_base 20: mod_base = OTHER; note = 2'-O-methyladenosine-3'-phosphate
  modified_base 21: mod_base = OTHER; note = 2'-O-methylguanosine-3'-phosphorothioate
  modified_base 22: mod_base = OTHER; note = 2'-O-methyladenosine-3'-phosphorothioate
  modified_base 23: mod_base = OTHER; note = 2'-O-methyladenosine-3'-phosphate
  misc_feature 1..6: note = RNA
  misc_feature 7: note = DNA
  misc_feature 8..23: note = RNA
atttcatcaatcatttggtagaa

SEQ ID NO: 944 - RNA, 23 nt, synthetic construct
  misc_feature 1..23: note = Description of Artificial Sequence: Synthetic oligonucleotide
  source 1..23: mol_type = other RNA
  modified_base 1: mod_base = OTHER; note = 2'-O-methyladenosine-3'-phosphorothioate
  modified_base 2: mod_base = OTHER; note = 2'-fluorouridine -3'-phosphorothioate
  modified_base 3: mod_base = OTHER; note = 2'-O-methyluridine-3'-phosphate
  modified_base 4: mod_base = OTHER; note = 2'-O-methylguanosine-3'-phosphate
  modified_base 5: mod_base = OTHER; note = 2'-O-methyluridine-3'-phosphate
  modified_base 6: mod_base = OTHER; note = 2'-O-methylguanosine-3'-phosphate
  modified_base 7: mod_base = OTHER; note = Guanosine-glycol nucleic acid (GNA)
  modified_base 8: mod_base = OTHER; note = 2'-O-methyluridine-3'-phosphate
  modified_base 9: mod_base = OTHER; note = 2'-O-methylcytidine-3'-phosphate
  modified_base 10: mod_base = OTHER; note = 2'-O-methyluridine-3'-phosphate
  modified_base 11: mod_base = OTHER; note = 2'-O-methyluridine-3'-phosphate
  modified_base 12: mod_base = OTHER; note = 2'-O-methylcytidine-3'-phosphate
  modified_base 13: mod_base = OTHER; note = 2'-O-methyladenosine-3'-phosphate
  modified_base 14: mod_base = OTHER; note = 2'-fluorouridine-3'-phosphate
  modified_base 15: mod_base = OTHER; note = 2'-O-methyladenosine-3'-phosphate
  modified_base 16: mod_base = OTHER; note = 2'-fluoroadenosine-3'-phosphate
  modified_base 17: mod_base = OTHER; note = 2'-O-methylcytidine-3'-phosphate
  modified_base 18: mod_base = OTHER; note = 2'-O-methyluridine-3'-phosphate
  modified_base 19: mod_base = OTHER; note = 2'-O-methylguanosine-3'-phosphate
  modified_base 20: mod_base = OTHER; note = 2'-O-methyladenosine-3'-phosphate
  modified_base 21: mod_base = OTHER; note = 2'-O-methyluridine-3'-phosphorothioate
  modified_base 22: mod_base = OTHER; note = 2'-O-methyluridine-3'-phosphorothioate
  modified_base 23: mod_base = OTHER; note = 2'-O-methyluridine-3'-phosphate
attgtggtcttcataactgattt

SEQ ID NO: 945 - RNA, 23 nt, synthetic construct
  misc_feature 1..23: note = Description of Artificial Sequence: Synthetic oligonucleotide
  source 1..23: mol_type = other RNA
  modified_base 1: mod_base = OTHER; note = 2'-O-methyladenosine-3'-phosphorothioate
  modified_base 2: mod_base = OTHER; note = 2'-fluorouridine -3'-phosphorothioate
  modified_base 3: mod_base = OTHER; note = 2'-O-methylcytidine-3'-phosphate
  modified_base 4: mod_base = OTHER; note = 2'-O-methyladenosine-3'-phosphate
  modified_base 5: mod_base = OTHER; note = 2'-O-methyluridine-3'-phosphate
  modified_base 6: mod_base = OTHER; note = 2'-O-methylcytidine-3'-phosphate
  modified_base 7: mod_base = OTHER; note = Adenosine-glycol nucleic acid (GNA)
  modified_base 8: mod_base = OTHER; note = 2'-O-methyladenosine-3'-phosphate
  modified_base 9: mod_base = OTHER; note = 2'-O-methyluridine-3'-phosphate
  modified_base 10: mod_base = OTHER; note = 2'-O-methylcytidine-3'-phosphate
  modified_base 11: mod_base = OTHER; note = 2'-O-methyladenosine-3'-phosphate
  modified_base 12: mod_base = OTHER; note = 2'-O-methyluridine-3'-phosphate
  modified_base 13: mod_base = OTHER; note = 2'-O-methyluridine-3'-phosphate
  modified_base 14: mod_base = OTHER; note = 2'-fluorouridine-3'-phosphate
  modified_base 15: mod_base = OTHER; note = 2'-O-methylguanosine-3'-phosphate
  modified_base 16: mod_base = OTHER; note = 2'-fluoroguanosine-3'-phosphate
  modified_base 17: mod_base = OTHER; note = 2'-O-methyluridine-3'-phosphate
  modified_base 18: mod_base = OTHER; note = 2'-O-methyladenosine-3'-phosphate
  modified_base 19: mod_base = OTHER; note = 2'-O-methylguanosine-3'-phosphate
  modified_base 20: mod_base = OTHER; note = 2'-O-methyladenosine-3'-phosphate
  modified_base 21: mod_base = OTHER; note = 2'-O-methyladenosine-3'-phosphorothioate
  modified_base 22: mod_base = OTHER; note = 2'-O-methyladenosine-3'-phosphorothioate
  modified_base 23: mod_base = OTHER; note = 2'-O-methyladenosine-3'-phosphate
atcatcaatcatttggtagaaaa

SEQ ID NO: 946 - DNA, 23 bp, synthetic construct
  misc_feature 1..23: note = Description of Artificial Sequence: Synthetic oligonucleotide
  source 1..23: mol_type = other DNA
  modified_base 1: mod_base = OTHER; note = 2'-O-methyladenosine-3'-phosphorothioate
  modified_base 2: mod_base = OTHER; note = 2'-fluorouridine -3'-phosphorothioate
  modified_base 3: mod_base = OTHER; note = 2'-O-methyladenosine-3'-phosphate
  modified_base 4: mod_base = OTHER; note = 2'-O-methyluridine-3'-phosphate
  modified_base 5: mod_base = OTHER; note = 2'-O-methylcytidine-3'-phosphate
  modified_base 6: mod_base = OTHER; note = 2'-O-methylcytidine-3'-phosphate
  modified_base 7: mod_base = OTHER; note = Thymidine-glycol nucleic acid (GNA) S-Isomer
  modified_base 8: mod_base = OTHER; note = 2'-O-methyluridine-3'-phosphate
  modified_base 9: mod_base = OTHER; note = 2'-O-methylguanosine-3'-phosphate
  modified_base 10: mod_base = OTHER; note = 2'-O-methyladenosine-3'-phosphate
  modified_base 11: mod_base = OTHER; note = 2'-O-methylcytidine-3'-phosphate
  modified_base 12: mod_base = OTHER; note = 2'-O-methyluridine-3'-phosphate
  modified_base 13: mod_base = OTHER; note = 2'-O-methyluridine-3'-phosphate
  modified_base 14: mod_base = OTHER; note = 2'-fluorouridine-3'-phosphate
  modified_base 15: mod_base = OTHER; note = 2'-O-methyladenosine-3'-phosphate
  modified_base 16: mod_base = OTHER; note = 2'-fluoroadenosine-3'-phosphate
  modified_base 17: mod_base = OTHER; note = 2'-O-methyladenosine-3'-phosphate
  modified_base 18: mod_base = OTHER; note = 2'-O-methylcytidine-3'-phosphate
  modified_base 19: mod_base = OTHER; note = 2'-O-methyladenosine-3'-phosphate
  modified_base 20: mod_base = OTHER; note = 2'-O-methylcytidine-3'-phosphate
  modified_base 21: mod_base = OTHER; note = 2'-O-methyladenosine-3'-phosphorothioate
  modified_base 22: mod_base = OTHER; note = 2'-O-methyluridine-3'-phosphorothioate
  modified_base 23: mod_base = OTHER; note = 2'-O-methylguanosine-3'-phosphate
  misc_feature 1..6: note = RNA
  misc_feature 7: note = DNA
  misc_feature 8..23: note = RNA
atatccttgactttaaacacatg

SEQ ID NO: 947 - RNA, 23 nt, synthetic construct
  misc_feature 1..23: note = Description of Artificial Sequence: Synthetic oligonucleotide
  source 1..23: mol_type = other RNA
  modified_base 1: mod_base = OTHER; note = 2'-O-methyladenosine-3'-phosphorothioate
  modified_base 2: mod_base = OTHER; note = 2'-fluoroguanosine-3'-phosphorothioate
  modified_base 3: mod_base = OTHER; note = 2'-O-methyluridine-3'-phosphate
  modified_base 4: mod_base = OTHER; note = 2'-O-methylguanosine-3'-phosphate
  modified_base 5: mod_base = OTHER; note = 2'-O-methylguanosine-3'-phosphate
  modified_base 6: mod_base = OTHER; note = 2'-O-methyluridine-3'-phosphate
  modified_base 7: mod_base = OTHER; note = Cytidine-glycol nucleic acid (GNA)
  modified_base 8: mod_base = OTHER; note = 2'-O-methyluridine-3'-phosphate
  modified_base 9: mod_base = OTHER; note = 2'-O-methyluridine-3'-phosphate
  modified_base 10: mod_base = OTHER; note = 2'-O-methylcytidine-3'-phosphate
  modified_base 11: mod_base = OTHER; note = 2'-O-methyladenosine-3'-phosphate
  modified_base 12: mod_base = OTHER; note = 2'-O-methyluridine-3'-phosphate
  modified_base 13: mod_base = OTHER; note = 2'-O-methyladenosine-3'-phosphate
  modified_base 14: mod_base = OTHER; note = 2'-fluoroadenosine-3'-phosphate
  modified_base 15: mod_base = OTHER; note = 2'-O-methylcytidine-3'-phosphate
  modified_base 16: mod_base = OTHER; note = 2'-fluorouridine-3'-phosphate
  modified_base 17: mod_base = OTHER; note = 2'-O-methylguanosine-3'-phosphate
  modified_base 18: mod_base = OTHER; note = 2'-O-methyladenosine-3'-phosphate
  modified_base 19: mod_base = OTHER; note = 2'-O-methyluridine-3'-phosphate
  modified_base 20: mod_base = OTHER; note = 2'-O-methyluridine-3'-phosphate
  modified_base 21: mod_base = OTHER; note = 2'-O-methyluridine-3'-phosphorothioate
  modified_base 22: mod_base = OTHER; note = 2'-O-methylguanosine-3'-phosphorothioate
  modified_base 23: mod_base = OTHER; note = 2'-O-methylguanosine-3'-phosphate
agtggtcttcataactgatttgg

SEQ ID NO: 948 - RNA, 23 nt, synthetic construct
  misc_feature 1..23: note = Description of Artificial Sequence: Synthetic oligonucleotide
  source 1..23: mol_type = other RNA
  modified_base 1: mod_base = OTHER; note = 2'-O-methyladenosine-3'-phosphorothioate
  modified_base 2: mod_base = OTHER; note = 2'-fluoroadenosine-3'-phosphorothioate
  modified_base 3: mod_base = OTHER; note = 2'-O-methylcytidine-3'-phosphate
  modified_base 4: mod_base = OTHER; note = 2'-O-methyladenosine-3'-phosphate
  modified_base 5: mod_base = OTHER; note = 2'-O-methyladenosine-3'-phosphate
  modified_base 6: mod_base = OTHER; note = 2'-O-methyladenosine-3'-phosphate
  modified_base 7: mod_base = OTHER; note = Cytidine-glycol nucleic acid (GNA)
  modified_base 8: mod_base = OTHER; note = 2'-O-methyladenosine-3'-phosphate
  modified_base 9: mod_base = OTHER; note = 2'-O-methylguanosine-3'-phosphate
  modified_base 10: mod_base = OTHER; note = 2'-O-methyladenosine-3'-phosphate
  modified_base 11: mod_base = OTHER; note = 2'-O-methylguanosine-3'-phosphate
  modified_base 12: mod_base = OTHER; note = 2'-O-methylcytidine-3'-phosphate
  modified_base 13: mod_base = OTHER; note = 2'-O-methyluridine-3'-phosphate
  modified_base 14: mod_base = OTHER; note = 2'-fluorouridine-3'-phosphate
  modified_base 15: mod_base = OTHER; note = 2'-O-methyluridine-3'-phosphate
  modified_base 16: mod_base = OTHER; note = 2'-fluoroguanosine-3'-phosphate
  modified_base 17: mod_base = OTHER; note = 2'-O-methyladenosine-3'-phosphate
  modified_base 18: mod_base = OTHER; note = 2'-O-methylcytidine-3'-phosphate
  modified_base 19: mod_base = OTHER; note = 2'-O-methyladenosine-3'-phosphate
  modified_base 20: mod_base = OTHER; note = 2'-O-methyluridine-3'-phosphate
  modified_base 21: mod_base = OTHER; note = 2'-O-methylcytidine-3'-phosphorothioate
  modified_base 22: mod_base = OTHER; note = 2'-O-methylcytidine-3'-phosphorothioate
  modified_base 23: mod_base = OTHER; note = 2'-O-methyluridine-3'-phosphate
aacaaacagagctttgacatcct

SEQ ID NO: 949 - RNA, 23 nt, synthetic construct
  misc_feature 1..23: note = Description of Artificial Sequence: Synthetic oligonucleotide
  source 1..23: mol_type = other RNA
  modified_base 1: mod_base = OTHER; note = 2'-O-methyladenosine-3'-phosphorothioate
  modified_base 2: mod_base = OTHER; note = 2'-fluoroadenosine-3'-phosphorothioate
  modified_base 3: mod_base = OTHER; note = 2'-O-methylguanosine-3'-phosphate
  modified_base 4: mod_base = OTHER; note = 2'-O-methylcytidine-3'-phosphate
  modified_base 5: mod_base = OTHER; note = 2'-O-methyladenosine-3'-phosphate
  modified_base 6: mod_base = OTHER; note = 2'-O-methyluridine-3'-phosphate
  modified_base 7: mod_base = OTHER; note = Cytidine-glycol nucleic acid (GNA)
  modified_base 8: mod_base = OTHER; note = 2'-O-methyluridine-3'-phosphate
  modified_base 9: mod_base = OTHER; note = 2'-O-methylcytidine-3'-phosphate
  modified_base 10: mod_base = OTHER; note = 2'-O-methyluridine-3'-phosphate
  modified_base 11: mod_base = OTHER; note = 2'-O-methylcytidine-3'-phosphate
  modified_base 12: mod_base = OTHER; note = 2'-O-methyluridine-3'-phosphate
  modified_base 13: mod_base = OTHER; note = 2'-O-methylcytidine-3'-phosphate
  modified_base 14: mod_base = OTHER; note = 2'-fluoroadenosine-3'-phosphate
  modified_base 15: mod_base = OTHER; note = 2'-O-methylcytidine-3'-phosphate
  modified_base 16: mod_base = OTHER; note = 2'-fluoroadenosine-3'-phosphate
  modified_base 17: mod_base = OTHER; note = 2'-O-methyladenosine-3'-phosphate
  modified_base 18: mod_base = OTHER; note = 2'-O-methylcytidine-3'-phosphate
  modified_base 19: mod_base = OTHER; note = 2'-O-methyluridine-3'-phosphate
  modified_base 20: mod_base = OTHER; note = 2'-O-methylguanosine-3'-phosphate
  modified_base 21: mod_base = OTHER; note = 2'-O-methylguanosine-3'-phosphorothioate
  modified_base 22: mod_base = OTHER; note = 2'-O-methylcytidine-3'-phosphorothioate
  modified_base 23: mod_base = OTHER; note = 2'-O-methyluridine-3'-phosphate
aagcatctctctcacaactggct

SEQ ID NO: 950 - RNA, 23 nt, synthetic construct
  misc_feature 1..23: note = Description of Artificial Sequence: Synthetic oligonucleotide
  source 1..23: mol_type = other RNA
  modified_base 1: mod_base = OTHER; note = 2'-O-methyladenosine-3'-phosphorothioate
  modified_base 2: mod_base = OTHER; note = 2'-fluoroguanosine-3'-phosphorothioate
  modified_base 3: mod_base = OTHER; note = 2'-O-methyladenosine-3'-phosphate
  modified_base 4: mod_base = OTHER; note = 2'-O-methylguanosine-3'-phosphate
  modified_base 5: mod_base = OTHER; note = 2'-O-methyluridine-3'-phosphate
  modified_base 6: mod_base = OTHER; note = 2'-O-methylguanosine-3'-phosphate
  modified_base 7: mod_base = OTHER; note = Adenosine-glycol nucleic acid (GNA)
  modified_base 8: mod_base = OTHER; note = 2'-O-methylcytidine-3'-phosphate
  modified_base 9: mod_base = OTHER; note = 2'-O-methyluridine-3'-phosphate
  modified_base 10: mod_base = OTHER; note = 2'-O-methylguanosine-3'-phosphate
  modified_base 11: mod_base = OTHER; note = 2'-O-methyladenosine-3'-phosphate
  modified_base 12: mod_base = OTHER; note = 2'-O-methylguanosine-3'-phosphate
  modified_base 13: mod_base = OTHER; note = 2'-O-methyladenosine-3'-phosphate
  modified_base 14: mod_base = OTHER; note = 2'-fluorouridine-3'-phosphate
  modified_base 15: mod_base = OTHER; note = 2'-O-methylcytidine-3'-phosphate
  modified_base 16: mod_base = OTHER; note = 2'-fluorouridine-3'-phosphate
  modified_base 17: mod_base = OTHER; note = 2'-O-methyluridine-3'-phosphate
  modified_base 18: mod_base = OTHER; note = 2'-O-methylguanosine-3'-phosphate
  modified_base 19: mod_base = OTHER; note = 2'-O-methylguanosine-3'-phosphate
  modified_base 20: mod_base = OTHER; note = 2'-O-methylcytidine-3'-phosphate
  modified_base 21: mod_base = OTHER; note = 2'-O-methyluridine-3'-phosphorothioate
  modified_base 22: mod_base = OTHER; note = 2'-O-methyluridine-3'-phosphorothioate
  modified_base 23: mod_base = OTHER; note = 2'-O-methylguanosine-3'-phosphate
agagtgactgagatcttggcttg

SEQ ID NO: 951 - RNA, 23 nt, synthetic construct
  misc_feature 1..23: note = Description of Artificial Sequence: Synthetic oligonucleotide
  source 1..23: mol_type = other RNA
  modified_base 1: mod_base = OTHER; note = 2'-O-methyladenosine-3'-phosphorothioate
  modified_base 2: mod_base = OTHER; note = 2'-fluoroadenosine-3'-phosphorothioate
  modified_base 3: mod_base = OTHER; note = 2'-O-methylcytidine-3'-phosphate
  modified_base 4: mod_base = OTHER; note = 2'-O-methyladenosine-3'-phosphate
  modified_base 5: mod_base = OTHER; note = 2'-O-methylcytidine-3'-phosphate
  modified_base 6: mod_base = OTHER; note = 2'-O-methylcytidine-3'-phosphate
  modified_base 7: mod_base = OTHER; note = Adenosine-glycol nucleic acid (GNA)
  modified_base 8: mod_base = OTHER; note = 2'-O-methyladenosine-3'-phosphate
  modified_base 9: mod_base = OTHER; note = 2'-O-methylcytidine-3'-phosphate
  modified_base 10: mod_base = OTHER; note = 2'-O-methyluridine-3'-phosphate
  modified_base 11: mod_base = OTHER; note = 2'-O-methyluridine-3'-phosphate
  modified_base 12: mod_base = OTHER; note = 2'-O-methylguanosine-3'-phosphate
  modified_base 13: mod_base = OTHER; note = 2'-O-methyladenosine-3'-phosphate
  modified_base 14: mod_base = OTHER; note = 2'-fluoroadenosine-3'-phosphate
  modified_base 15: mod_base = OTHER; note = 2'-O-methyluridine-3'-phosphate
  modified_base 16: mod_base = OTHER; note = 2'-fluoroguanosine-3'-phosphate
  modified_base 17: mod_base = OTHER; note = 2'-O-methyladenosine-3'-phosphate
  modified_base 18: mod_base = OTHER; note = 2'-O-methyladenosine-3'-phosphate
  modified_base 19: mod_base = OTHER; note = 2'-O-methylguanosine-3'-phosphate
  modified_base 20: mod_base = OTHER; note = 2'-O-methylcytidine-3'-phosphate
  modified_base 21: mod_base = OTHER; note = 2'-O-methylguanosine-3'-phosphorothioate
  modified_base 22: mod_base = OTHER; note = 2'-O-methylguanosine-3'-phosphorothioate
  modified_base 23: mod_base = OTHER; note = 2'-O-methylcytidine-3'-phosphate
aacaccaacttgaatgaagcggc

SEQ ID NO: 952 - RNA, 23 nt, synthetic construct
  misc_feature 1..23: note = Description of Artificial Sequence: Synthetic oligonucleotide
  source 1..23: mol_type = other RNA
  modified_base 1: mod_base = OTHER; note = 2'-O-methyladenosine-3'-phosphorothioate
  modified_base 2: mod_base = OTHER; note = 2'-fluorouridine -3'-phosphorothioate
  modified_base 3: mod_base = OTHER; note = 2'-O-methylcytidine-3'-phosphate
  modified_base 4: mod_base = OTHER; note = 2'-O-methylcytidine-3'-phosphate
  modified_base 5: mod_base = OTHER; note = 2'-O-methyluridine-3'-phosphate
  modified_base 6: mod_base = OTHER; note = 2'-O-methyluridine-3'-phosphate
  modified_base 7: mod_base = OTHER; note = Guanosine-glycol nucleic acid (GNA)
  modified_base 8: mod_base = OTHER; note = 2'-O-methyladenosine-3'-phosphate
  modified_base 9: mod_base = OTHER; note = 2'-O-methylcytidine-3'-phosphate
  modified_base 10: mod_base = OTHER; note = 2'-O-methyluridine-3'-phosphate
  modified_base 11: mod_base = OTHER; note = 2'-O-methyluridine-3'-phosphate
  modified_base 12: mod_base = OTHER; note = 2'-O-methyluridine-3'-phosphate
  modified_base 13: mod_base = OTHER; note = 2'-O-methyladenosine-3'-phosphate
  modified_base 14: mod_base = OTHER; note = 2'-fluoroadenosine-3'-phosphate
  modified_base 15: mod_base = OTHER; note = 2'-O-methyladenosine-3'-phosphate
  modified_base 16: mod_base = OTHER; note = 2'-fluorocytidine-3'-phosphate
  modified_base 17: mod_base = OTHER; note = 2'-O-methyladenosine-3'-phosphate
  modified_base 18: mod_base = OTHER; note = 2'-O-methylcytidine-3'-phosphate
  modified_base 19: mod_base = OTHER; note = 2'-O-methyladenosine-3'-phosphate
  modified_base 20: mod_base = OTHER; note = 2'-O-methyluridine-3'-phosphate
  modified_base 21: mod_base = OTHER; note = 2'-O-methylguanosine-3'-phosphorothioate
  modified_base 22: mod_base = OTHER; note = 2'-O-methyladenosine-3'-phosphorothioate
  modified_base 23: mod_base = OTHER; note = 2'-O-methyluridine-3'-phosphate
atccttgactttaaacacatgat

SEQ ID NO: 953 - DNA, 23 bp, synthetic construct
  misc_feature 1..23: note = Description of Artificial Sequence: Synthetic oligonucleotide
  source 1..23: mol_type = other DNA
  modified_base 1: mod_base = OTHER; note = 2'-O-methyladenosine-3'-phosphorothioate
  modified_base 2: mod_base = OTHER; note = 2'-fluorouridine -3'-phosphorothioate
  modified_base 3: mod_base = OTHER; note = 2'-O-methylguanosine-3'-phosphate
  modified_base 4: mod_base = OTHER; note = 2'-O-methyluridine-3'-phosphate
  modified_base 5: mod_base = OTHER; note = 2'-O-methylguanosine-3'-phosphate
  modified_base 6: mod_base = OTHER; note = 2'-O-methylguanosine-3'-phosphate
  modified_base 7: mod_base = OTHER; note = Thymidine-glycol nucleic acid (GNA) S-Isomer
  modified_base 8: mod_base = OTHER; note = 2'-O-methylcytidine-3'-phosphate
  modified_base 9: mod_base = OTHER; note = 2'-O-methyluridine-3'-phosphate
  modified_base 10: mod_base = OTHER; note = 2'-O-methyluridine-3'-phosphate
  modified_base 11: mod_base = OTHER; note = 2'-O-methylcytidine-3'-phosphate
  modified_base 12: mod_base = OTHER; note = 2'-O-methyladenosine-3'-phosphate
  modified_base 13: mod_base = OTHER; note = 2'-O-methyluridine-3'-phosphate
  modified_base 14: mod_base = OTHER; note = 2'-fluoroadenosine-3'-phosphate
  modified_base 15: mod_base = OTHER; note = 2'-O-methyladenosine-3'-phosphate
  modified_base 16: mod_base = OTHER; note = 2'-fluorocytidine-3'-phosphate
  modified_base 17: mod_base = OTHER; note = 2'-O-methyluridine-3'-phosphate
  modified_base 18: mod_base = OTHER; note = 2'-O-methylguanosine-3'-phosphate
  modified_base 19: mod_base = OTHER; note = 2'-O-methyladenosine-3'-phosphate
  modified_base 20: mod_base = OTHER; note = 2'-O-methyluridine-3'-phosphate
  modified_base 21: mod_base = OTHER; note = 2'-O-methyluridine-3'-phosphorothioate
  modified_base 22: mod_base = OTHER; note = 2'-O-methyluridine-3'-phosphorothioate
  modified_base 23: mod_base = OTHER; note = 2'-O-methylguanosine-3'-phosphate
  misc_feature 1..6: note = RNA
  misc_feature 7: note = DNA
  misc_feature 8..23: note = RNA
atgtggtcttcataactgatttg

SEQ ID NO: 954 - RNA, 23 nt, synthetic construct
  misc_feature 1..23: note = Description of Artificial Sequence: Synthetic oligonucleotide
  source 1..23: mol_type = other RNA
  modified_base 1: mod_base = OTHER; note = 2'-O-methyladenosine-3'-phosphorothioate
  modified_base 2: mod_base = OTHER; note = 2'-fluoroadenosine-3'-phosphorothioate
  modified_base 3: mod_base = OTHER; note = 2'-O-methylcytidine-3'-phosphate
  modified_base 4: mod_base = OTHER; note = 2'-O-methyladenosine-3'-phosphate
  modified_base 5: mod_base = OTHER; note = 2'-O-methylguanosine-3'-phosphate
  modified_base 6: mod_base = OTHER; note = 2'-O-methyladenosine-3'-phosphate
  modified_base 7: mod_base = OTHER; note = Guanosine-glycol nucleic acid (GNA)
  modified_base 8: mod_base = OTHER; note = 2'-O-methylcytidine-3'-phosphate
  modified_base 9: mod_base = OTHER; note = 2'-O-methyluridine-3'-phosphate
  modified_base 10: mod_base = OTHER; note = 2'-O-methyluridine-3'-phosphate
  modified_base 11: mod_base = OTHER; note = 2'-O-methyluridine-3'-phosphate
  modified_base 12: mod_base = OTHER; note = 2'-O-methylguanosine-3'-phosphate
  modified_base 13: mod_base = OTHER; note = 2'-O-methyladenosine-3'-phosphate
  modified_base 14: mod_base = OTHER; note = 2'-fluorocytidine-3'-phosphate
  modified_base 15: mod_base = OTHER; note = 2'-O-methyladenosine-3'-phosphate
  modified_base 16: mod_base = OTHER; note = 2'-fluorouridine-3'-phosphate
  modified_base 17: mod_base = OTHER; note = 2'-O-methylcytidine-3'-phosphate
  modified_base 18: mod_base = OTHER; note = 2'-O-methylcytidine-3'-phosphate
  modified_base 19: mod_base = OTHER; note = 2'-O-methyluridine-3'-phosphate
  modified_base 20: mod_base = OTHER; note = 2'-O-methyluridine-3'-phosphate
  modified_base 21: mod_base = OTHER; note = 2'-O-methylcytidine-3'-phosphorothioate
  modified_base 22: mod_base = OTHER; note = 2'-O-methyladenosine-3'-phosphorothioate
  modified_base 23: mod_base = OTHER; note = 2'-O-methylcytidine-3'-phosphate
aacagagctttgacatccttcac

SEQ ID NO: 955 - DNA, 23 bp, synthetic construct
  misc_feature 1..23: note = Description of Artificial Sequence: Synthetic oligonucleotide
  source 1..23: mol_type = other DNA
  modified_base 1: mod_base = OTHER; note = 2'-O-methyladenosine-3'-phosphorothioate
  modified_base 2: mod_base = OTHER; note = 2'-fluoroadenosine-3'-phosphorothioate
  modified_base 3: mod_base = OTHER; note = 2'-O-methyladenosine-3'-phosphate
  modified_base 4: mod_base = OTHER; note = 2'-O-methyluridine-3'-phosphate
  modified_base 5: mod_base = OTHER; note = 2'-O-methylcytidine-3'-phosphate
  modified_base 6: mod_base = OTHER; note = 2'-O-methyladenosine-3'-phosphate
  modified_base 7: mod_base = OTHER; note = Thymidine-glycol nucleic acid (GNA) S-Isomer
  modified_base 8: mod_base = OTHER; note = 2'-O-methyluridine-3'-phosphate
  modified_base 9: mod_base = OTHER; note = 2'-O-methyluridine-3'-phosphate
  modified_base 10: mod_base = OTHER; note = 2'-O-methylguanosine-3'-phosphate
  modified_base 11: mod_base = OTHER; note = 2'-O-methylguanosine-3'-phosphate
  modified_base 12: mod_base = OTHER; note = 2'-O-methyluridine-3'-phosphate
  modified_base 13: mod_base = OTHER; note = 2'-O-methyladenosine-3'-phosphate
  modified_base 14: mod_base = OTHER; note = 2'-fluoroguanosine-3'-phosphate
  modified_base 15: mod_base = OTHER; note = 2'-O-methyladenosine-3'-phosphate
  modified_base 16: mod_base = OTHER; note = 2'-fluoroadenosine-3'-phosphate
  modified_base 17: mod_base = OTHER; note = 2'-O-methyladenosine-3'-phosphate
  modified_base 18: mod_base = OTHER; note = 2'-O-methyladenosine-3'-phosphate
  modified_base 19: mod_base = OTHER; note = 2'-O-methylcytidine-3'-phosphate
  modified_base 20: mod_base = OTHER; note = 2'-O-methyladenosine-3'-phosphate
  modified_base 21: mod_base = OTHER; note = 2'-O-methyluridine-3'-phosphorothioate
  modified_base 22: mod_base = OTHER; note = 2'-O-methyluridine-3'-phosphorothioate
  modified_base 23: mod_base = OTHER; note = 2'-O-methylcytidine-3'-phosphate
  misc_feature 1..6: note = RNA
  misc_feature 7: note = DNA
  misc_feature 8..23: note = RNA
aaatcatttggtagaaaacattc

SEQ ID NO: 956 - DNA, 23 bp, synthetic construct
  misc_feature 1..23: note = Description of Artificial Sequence: Synthetic oligonucleotide
  source 1..23: mol_type = other DNA
  modified_base 1: mod_base = OTHER; note = 2'-O-methyladenosine-3'-phosphorothioate
  modified_base 2: mod_base = OTHER; note = 2'-fluoroguanosine-3'-phosphorothioate
  modified_base 3: mod_base = OTHER; note = 2'-O-methyluridine-3'-phosphate
  modified_base 4: mod_base = OTHER; note = 2'-O-methylguanosine-3'-phosphate
  modified_base 5: mod_base = OTHER; note = 2'-O-methyladenosine-3'-phosphate
  modified_base 6: mod_base = OTHER; note = 2'-O-methylcytidine-3'-phosphate
  modified_base 7: mod_base = OTHER; note = Thymidine-glycol nucleic acid (GNA) S-Isomer
  modified_base 8: mod_base = OTHER; note = 2'-O-methylguanosine-3'-phosphate
  modified_base 9: mod_base = OTHER; note = 2'-O-methyladenosine-3'-phosphate
  modified_base 10: mod_base = OTHER; note = 2'-O-methylguanosine-3'-phosphate
  modified_base 11: mod_base = OTHER; note = 2'-O-methyladenosine-3'-phosphate
  modified_base 12: mod_base = OTHER; note = 2'-O-methyluridine-3'-phosphate
  modified_base 13: mod_base = OTHER; note = 2'-O-methylcytidine-3'-phosphate
  modified_base 14: mod_base = OTHER; note = 2'-fluorouridine-3'-phosphate
  modified_base 15: mod_base = OTHER; note = 2'-O-methyluridine-3'-phosphate
  modified_base 16: mod_base = OTHER; note = 2'-fluoroguanosine-3'-phosphate
  modified_base 17: mod_base = OTHER; note = 2'-O-methylguanosine-3'-phosphate
  modified_base 18: mod_base = OTHER; note = 2'-O-methylcytidine-3'-phosphate
  modified_base 19: mod_base = OTHER; note = 2'-O-methyluridine-3'-phosphate
  modified_base 20: mod_base = OTHER; note = 2'-O-methyluridine-3'-phosphate
  modified_base 21: mod_base = OTHER; note = 2'-O-methylguanosine-3'-phosphorothioate
  modified_base 22: mod_base = OTHER; note = 2'-O-methylcytidine-3'-phosphorothioate
  modified_base 23: mod_base = OTHER; note = 2'-O-methylcytidine-3'-phosphate
  misc_feature 1..6: note = RNA
  misc_feature 7: note = DNA
  misc_feature 8..23: note = RNA
agtgactgagatcttggcttgcc

SEQ ID NO: 957 - RNA, 23 nt, synthetic construct
  misc_feature 1..23: note = Description of Artificial Sequence: Synthetic oligonucleotide
  source 1..23: mol_type = other RNA
  modified_base 1: mod_base = OTHER; note = 2'-O-methyladenosine-3'-phosphorothioate
  modified_base 2: mod_base = OTHER; note = 2'-fluoroadenosine-3'-phosphorothioate
  modified_base 3: mod_base = OTHER; note = 2'-O-methylcytidine-3'-phosphate
  modified_base 4: mod_base = OTHER; note = 2'-O-methylcytidine-3'-phosphate
  modified_base 5: mod_base = OTHER; note = 2'-O-methyluridine-3'-phosphate
  modified_base 6: mod_base = OTHER; note = 2'-O-methyluridine-3'-phosphate
  modified_base 7: mod_base = OTHER; note = Cytidine-glycol nucleic acid (GNA)
  modified_base 8: mod_base = OTHER; note = 2'-O-methyluridine-3'-phosphate
  modified_base 9: mod_base = OTHER; note = 2'-O-methylcytidine-3'-phosphate
  modified_base 10: mod_base = OTHER; note = 2'-O-methyladenosine-3'-phosphate
  modified_base 11: mod_base = OTHER; note = 2'-O-methyladenosine-3'-phosphate
  modified_base 12: mod_base = OTHER; note = 2'-O-methyluridine-3'-phosphate
  modified_base 13: mod_base = OTHER; note = 2'-O-methylcytidine-3'-phosphate
  modified_base 14: mod_base = OTHER; note = 2'-fluoroadenosine-3'-phosphate
  modified_base 15: mod_base = OTHER; note = 2'-O-methyladenosine-3'-phosphate
  modified_base 16: mod_base = OTHER; note = 2'-fluoroguanosine-3'-phosphate
  modified_base 17: mod_base = OTHER; note = 2'-O-methyluridine-3'-phosphate
  modified_base 18: mod_base = OTHER; note = 2'-O-methyluridine-3'-phosphate
  modified_base 19: mod_base = OTHER; note = 2'-O-methylguanosine-3'-phosphate
  modified_base 20: mod_base = OTHER; note = 2'-O-methylguanosine-3'-phosphate
  modified_base 21: mod_base = OTHER; note = 2'-O-methyluridine-3'-phosphorothioate
  modified_base 22: mod_base = OTHER; note = 2'-O-methylguanosine-3'-phosphorothioate
  modified_base 23: mod_base = OTHER; note = 2'-O-methyladenosine-3'-phosphate
aaccttctcaatcaagttggtga

SEQ ID NO: 958 - RNA, 23 nt, synthetic construct
  misc_feature 1..23: note = Description of Artificial Sequence: Synthetic oligonucleotide
  source 1..23: mol_type = other RNA
  modified_base 1: mod_base = OTHER; note = 2'-O-methyladenosine-3'-phosphorothioate
  modified_base 2: mod_base = OTHER; note = 2'-fluorocytidine-3'-phosphorothioate
  modified_base 3: mod_base = OTHER; note = 2'-O-methyladenosine-3'-phosphate
  modified_base 4: mod_base = OTHER; note = 2'-O-methyladenosine-3'-phosphate
  modified_base 5: mod_base = OTHER; note = 2'-O-methyladenosine-3'-phosphate
  modified_base 6: mod_base = OTHER; note = 2'-O-methylcytidine-3'-phosphate
  modified_base 7: mod_base = OTHER; note = Adenosine-glycol nucleic acid (GNA)
  modified_base 8: mod_base = OTHER; note = 2'-O-methylguanosine-3'-phosphate
  modified_base 9: mod_base = OTHER; note = 2'-O-methyladenosine-3'-phosphate
  modified_base 10: mod_base = OTHER; note = 2'-O-methylguanosine-3'-phosphate
  modified_base 11: mod_base = OTHER; note = 2'-O-methylcytidine-3'-phosphate
  modified_base 12: mod_base = OTHER; note = 2'-O-methyluridine-3'-phosphate
  modified_base 13: mod_base = OTHER; note = 2'-O-methyluridine-3'-phosphate
  modified_base 14: mod_base = OTHER; note = 2'-fluorouridine-3'-phosphate
  modified_base 15: mod_base = OTHER; note = 2'-O-methylguanosine-3'-phosphate
  modified_base 16: mod_base = OTHER; note = 2'-fluoroadenosine-3'-phosphate
  modified_base 17: mod_base = OTHER; note = 2'-O-methylcytidine-3'-phosphate
  modified_base 18: mod_base = OTHER; note = 2'-O-methyladenosine-3'-phosphate
  modified_base 19: mod_base = OTHER; note = 2'-O-methyluridine-3'-phosphate
  modified_base 20: mod_base = OTHER; note = 2'-O-methylcytidine-3'-phosphate
  modified_base 21: mod_base = OTHER; note = 2'-O-methylcytidine-3'-phosphorothioate
  modified_base 22: mod_base = OTHER; note = 2'-O-methyluridine-3'-phosphorothioate
  modified_base 23: mod_base = OTHER; note = 2'-O-methyluridine-3'-phosphate
acaaacagagctttgacatcctt

SEQ ID NO: 959 - RNA, 23 nt, synthetic construct
  misc_feature 1..23: note = Description of Artificial Sequence: Synthetic oligonucleotide
  source 1..23: mol_type = other RNA
  modified_base 1: mod_base = OTHER; note = 2'-O-methyladenosine-3'-phosphorothioate
  modified_base 2: mod_base = OTHER; note = 2'-fluoroguanosine-3'-phosphorothioate
  modified_base 3: mod_base = OTHER; note = 2'-O-methyladenosine-3'-phosphate
  modified_base 4: mod_base = OTHER; note = 2'-O-methyladenosine-3'-phosphate
  modified_base 5: mod_base = OTHER; note = 2'-O-methyladenosine-3'-phosphate
  modified_base 6: mod_base = OTHER; note = 2'-O-methyladenosine-3'-phosphate
  modified_base 7: mod_base = OTHER; note = Cytidine-glycol nucleic acid (GNA)
  modified_base 8: mod_base = OTHER; note = 2'-O-methylcytidine-3'-phosphate
  modified_base 9: mod_base = OTHER; note = 2'-O-methylcytidine-3'-phosphate
  modified_base 10: mod_base = OTHER; note = 2'-O-methyladenosine-3'-phosphate
  modified_base 11: mod_base = OTHER; note = 2'-O-methyladenosine-3'-phosphate
  modified_base 12: mod_base = OTHER; note = 2'-O-methyladenosine-3'-phosphate
  modified_base 13: mod_base = OTHER; note = 2'-O-methyluridine-3'-phosphate
  modified_base 14: mod_base = OTHER; note = 2'-fluorocytidine-3'-phosphate
  modified_base 15: mod_base = OTHER; note = 2'-O-methylcytidine-3'-phosphate
  modified_base 16: mod_base = OTHER; note = 2'-fluorouridine-3'-phosphate
  modified_base 17: mod_base = OTHER; note = 2'-O-methylcytidine-3'-phosphate
  modified_base 18: mod_base = OTHER; note = 2'-O-methyladenosine-3'-phosphate
  modified_base 19: mod_base = OTHER; note = 2'-O-methyluridine-3'-phosphate
  modified_base 20: mod_base = OTHER; note = 2'-O-methylcytidine-3'-phosphate
  modified_base 21: mod_base = OTHER; note = 2'-O-methyluridine-3'-phosphorothioate
  modified_base 22: mod_base = OTHER; note = 2'-O-methyluridine-3'-phosphorothioate
  modified_base 23: mod_base = OTHER; note = 2'-O-methyluridine-3'-phosphate
agaaaacccaaatcctcatcttt

SEQ ID NO: 960 - RNA, 23 nt, synthetic construct
  misc_feature 1..23: note = Description of Artificial Sequence: Synthetic oligonucleotide
  source 1..23: mol_type = other RNA
  modified_base 1: mod_base = OTHER; note = 2'-O-methyladenosine-3'-phosphorothioate
  modified_base 2: mod_base = OTHER; note = 2'-fluorocytidine-3'-phosphorothioate
  modified_base 3: mod_base = OTHER; note = 2'-O-methylguanosine-3'-phosphate
  modified_base 4: mod_base = OTHER; note = 2'-O-methyladenosine-3'-phosphate
  modified_base 5: mod_base = OTHER; note = 2'-O-methylguanosine-3'-phosphate
  modified_base 6: mod_base = OTHER; note = 2'-O-methyluridine-3'-phosphate
  modified_base 7: mod_base = OTHER; note = Guanosine-glycol nucleic acid (GNA)
  modified_base 8: mod_base = OTHER; note = 2'-O-methyladenosine-3'-phosphate
  modified_base 9: mod_base = OTHER; note = 2'-O-methylcytidine-3'-phosphate
  modified_base 10: mod_base = OTHER; note = 2'-O-methyluridine-3'-phosphate
  modified_base 11: mod_base = OTHER; note = 2'-O-methylguanosine-3'-phosphate
  modified_base 12: mod_base = OTHER; note = 2'-O-methyladenosine-3'-phosphate
  modified_base 13: mod_base = OTHER; note = 2'-O-methylguanosine-3'-phosphate
  modified_base 14: mod_base = OTHER; note = 2'-fluoroadenosine-3'-phosphate
  modified_base 15: mod_base = OTHER; note = 2'-O-methyluridine-3'-phosphate
  modified_base 16: mod_base = OTHER; note = 2'-fluorocytidine-3'-phosphate
  modified_base 17: mod_base = OTHER; note = 2'-O-methyluridine-3'-phosphate
  modified_base 18: mod_base = OTHER; note = 2'-O-methyluridine-3'-phosphate
  modified_base 19: mod_base = OTHER; note = 2'-O-methylguanosine-3'-phosphate
  modified_base 20: mod_base = OTHER; note = 2'-O-methylguanosine-3'-phosphate
  modified_base 21: mod_base = OTHER; note = 2'-O-methylcytidine-3'-phosphorothioate
  modified_base 22: mod_base = OTHER; note = 2'-O-methyluridine-3'-phosphorothioate
  modified_base 23: mod_base = OTHER; note = 2'-O-methyluridine-3'-phosphate
acgagtgactgagatcttggctt

SEQ ID NO: 961 - RNA, 23 nt, synthetic construct
  misc_feature 1..23: note = Description of Artificial Sequence: Synthetic oligonucleotide
  source 1..23: mol_type = other RNA
  modified_base 1: mod_base = OTHER; note = 2'-O-methyladenosine-3'-phosphorothioate
  modified_base 2: mod_base = OTHER; note = 2'-fluorocytidine-3'-phosphorothioate
  modified_base 3: mod_base = OTHER; note = 2'-O-methyladenosine-3'-phosphate
  modified_base 4: mod_base = OTHER; note = 2'-O-methylcytidine-3'-phosphate
  modified_base 5: mod_base = OTHER; note = 2'-O-methylcytidine-3'-phosphate
  modified_base 6: mod_base = OTHER; note = 2'-O-methyladenosine-3'-phosphate
  modified_base 7: mod_base = OTHER; note = Adenosine-glycol nucleic acid (GNA)
  modified_base 8: mod_base = OTHER; note = 2'-O-methylcytidine-3'-phosphate
  modified_base 9: mod_base = OTHER; note = 2'-O-methyluridine-3'-phosphate
  modified_base 10: mod_base = OTHER; note = 2'-O-methyluridine-3'-phosphate
  modified_base 11: mod_base = OTHER; note = 2'-O-methylguanosine-3'-phosphate
  modified_base 12: mod_base = OTHER; note = 2'-O-methyladenosine-3'-phosphate
  modified_base 13: mod_base = OTHER; note = 2'-O-methyladenosine-3'-phosphate
  modified_base 14: mod_base = OTHER; note = 2'-fluorouridine-3'-phosphate
  modified_base 15: mod_base = OTHER; note = 2'-O-methylguanosine-3'-phosphate
  modified_base 16: mod_base = OTHER; note = 2'-fluoroadenosine-3'-phosphate
  modified_base 17: mod_base = OTHER; note = 2'-O-methyladenosine-3'-phosphate
  modified_base 18: mod_base = OTHER; note = 2'-O-methylguanosine-3'-phosphate
  modified_base 19: mod_base = OTHER; note = 2'-O-methylcytidine-3'-phosphate
  modified_base 20: mod_base = OTHER; note = 2'-O-methylguanosine-3'-phosphate
  modified_base 21: mod_base = OTHER; note = 2'-O-methylguanosine-3'-phosphorothioate
  modified_base 22: mod_base = OTHER; note = 2'-O-methylcytidine-3'-phosphorothioate
  modified_base 23: mod_base = OTHER; note = 2'-O-methyluridine-3'-phosphate
acaccaacttgaatgaagcggct

SEQ ID NO: 962 - DNA, 23 bp, synthetic construct
  misc_feature 1..23: note = Description of Artificial Sequence: Synthetic oligonucleotide
  source 1..23: mol_type = other DNA
  modified_base 1: mod_base = OTHER; note = 2'-O-methyladenosine-3'-phosphorothioate
  modified_base 2: mod_base = OTHER; note = 2'-fluoroguanosine-3'-phosphorothioate
  modified_base 3: mod_base = OTHER; note = 2'-O-methylcytidine-3'-phosphate
  modified_base 4: mod_base = OTHER; note = 2'-O-methyladenosine-3'-phosphate
  modified_base 5: mod_base = OTHER; note = 2'-O-methyluridine-3'-phosphate
  modified_base 6: mod_base = OTHER; note = 2'-O-methylcytidine-3'-phosphate
  modified_base 7: mod_base = OTHER; note = Thymidine-glycol nucleic acid (GNA) S-Isomer
  modified_base 8: mod_base = OTHER; note = 2'-O-methylcytidine-3'-phosphate
  modified_base 9: mod_base = OTHER; note = 2'-O-methyluridine-3'-phosphate
  modified_base 10: mod_base = OTHER; note = 2'-O-methylcytidine-3'-phosphate
  modified_base 11: mod_base = OTHER; note = 2'-O-methyluridine-3'-phosphate
  modified_base 12: mod_base = OTHER; note = 2'-O-methylcytidine-3'-phosphate
  modified_base 13: mod_base = OTHER; note = 2'-O-methyladenosine-3'-phosphate
  modified_base 14: mod_base = OTHER; note = 2'-fluorocytidine-3'-phosphate
  modified_base 15: mod_base = OTHER; note = 2'-O-methyladenosine-3'-phosphate
  modified_base 16: mod_base = OTHER; note = 2'-fluoroadenosine-3'-phosphate
  modified_base 17: mod_base = OTHER; note = 2'-O-methylcytidine-3'-phosphate
  modified_base 18: mod_base = OTHER; note = 2'-O-methyluridine-3'-phosphate
  modified_base 19: mod_base = OTHER; note = 2'-O-methylguanosine-3'-phosphate
  modified_base 20: mod_base = OTHER; note = 2'-O-methylguanosine-3'-phosphate
  modified_base 21: mod_base = OTHER; note = 2'-O-methylcytidine-3'-phosphorothioate
  modified_base 22: mod_base = OTHER; note = 2'-O-methyluridine-3'-phosphorothioate
  modified_base 23: mod_base = OTHER; note = 2'-O-methyluridine-3'-phosphate
  misc_feature 1..6: note = RNA
  misc_feature 7: note = DNA
  misc_feature 8..23: note = RNA
agcatctctctcacaactggctt

SEQ ID NO: 963 - RNA, 23 nt, synthetic construct
  misc_feature 1..23: note = Description of Artificial Sequence: Synthetic oligonucleotide
  source 1..23: mol_type = other RNA
  modified_base 1: mod_base = OTHER; note = 2'-O-methyladenosine-3'-phosphorothioate
  modified_base 2: mod_base = OTHER; note = 2'-fluoroadenosine-3'-phosphorothioate
  modified_base 3: mod_base = OTHER; note = 2'-O-methylcytidine-3'-phosphate
  modified_base 4: mod_base = OTHER; note = 2'-O-methylcytidine-3'-phosphate
  modified_base 5: mod_base = OTHER; note = 2'-O-methyladenosine-3'-phosphate
  modified_base 6: mod_base = OTHER; note = 2'-O-methylguanosine-3'-phosphate
  modified_base 7: mod_base = OTHER; note = Guanosine-glycol nucleic acid (GNA)
  modified_base 8: mod_base = OTHER; note = 2'-O-methyluridine-3'-phosphate
  modified_base 9: mod_base = OTHER; note = 2'-O-methyladenosine-3'-phosphate
  modified_base 10: mod_base = OTHER; note = 2'-O-methylguanosine-3'-phosphate
  modified_base 11: mod_base = OTHER; note = 2'-O-methyladenosine-3'-phosphate
  modified_base 12: mod_base = OTHER; note = 2'-O-methyluridine-3'-phosphate
  modified_base 13: mod_base = OTHER; note = 2'-O-methyladenosine-3'-phosphate
  modified_base 14: mod_base = OTHER; note = 2'-fluorouridine-3'-phosphate
  modified_base 15: mod_base = OTHER; note = 2'-O-methyluridine-3'-phosphate
  modified_base 16: mod_base = OTHER; note = 2'-fluorocytidine-3'-phosphate
  modified_base 17: mod_base = OTHER; note = 2'-O-methyladenosine-3'-phosphate
  modified_base 18: mod_base = OTHER; note = 2'-O-methyluridine-3'-phosphate
  modified_base 19: mod_base = OTHER; note = 2'-O-methylguanosine-3'-phosphate
  modified_base 20: mod_base = OTHER; note = 2'-O-methylguanosine-3'-phosphate
  modified_base 21: mod_base = OTHER; note = 2'-O-methyladenosine-3'-phosphorothioate
  modified_base 22: mod_base = OTHER; note = 2'-O-methylguanosine-3'-phosphorothioate
  modified_base 23: mod_base = OTHER; note = 2'-O-methylcytidine-3'-phosphate
aaccaggtagatattcatggagc

SEQ ID NO: 964 - RNA, 23 nt, synthetic construct
  misc_feature 1..23: note = Description of Artificial Sequence: Synthetic oligonucleotide
  source 1..23: mol_type = other RNA
  modified_base 1: mod_base = OTHER; note = 2'-O-methyladenosine-3'-phosphorothioate
  modified_base 2: mod_base = OTHER; note = 2'-fluoroadenosine-3'-phosphorothioate
  modified_base 3: mod_base = OTHER; note = 2'-O-methyluridine-3'-phosphate
  modified_base 4: mod_base = OTHER; note = 2'-O-methyladenosine-3'-phosphate
  modified_base 5: mod_base = OTHER; note = 2'-O-methyluridine-3'-phosphate
  modified_base 6: mod_base = OTHER; note = 2'-O-methylcytidine-3'-phosphate
  modified_base 7: mod_base = OTHER; note = Cytidine-glycol nucleic acid (GNA)
  modified_base 8: mod_base = OTHER; note = 2'-O-methyluridine-3'-phosphate
  modified_base 9: mod_base = OTHER; note = 2'-O-methyluridine-3'-phosphate
  modified_base 10: mod_base = OTHER; note = 2'-O-methylguanosine-3'-phosphate
  modified_base 11: mod_base = OTHER; note = 2'-O-methyladenosine-3'-phosphate
  modified_base 12: mod_base = OTHER; note = 2'-O-methylcytidine-3'-phosphate
  modified_base 13: mod_base = OTHER; note = 2'-O-methyluridine-3'-phosphate
  modified_base 14: mod_base = OTHER; note = 2'-fluorouridine-3'-phosphate
  modified_base 15: mod_base = OTHER; note = 2'-O-methyluridine-3'-phosphate
  modified_base 16: mod_base = OTHER; note = 2'-fluoroadenosine-3'-phosphate
  modified_base 17: mod_base = OTHER; note = 2'-O-methyladenosine-3'-phosphate
  modified_base 18: mod_base = OTHER; note = 2'-O-methyladenosine-3'-phosphate
  modified_base 19: mod_base = OTHER; note = 2'-O-methylcytidine-3'-phosphate
  modified_base 20: mod_base = OTHER; note = 2'-O-methyladenosine-3'-phosphate
  modified_base 21: mod_base = OTHER; note = 2'-O-methylcytidine-3'-phosphorothioate
  modified_base 22: mod_base = OTHER; note = 2'-O-methyladenosine-3'-phosphorothioate
  modified_base 23: mod_base = OTHER; note = 2'-O-methyluridine-3'-phosphate
aatatccttgactttaaacacat

SEQ ID NO: 965 - RNA, 23 nt, synthetic construct
  misc_feature 1..23: note = Description of Artificial Sequence: Synthetic oligonucleotide
  source 1..23: mol_type = other RNA
  modified_base 1: mod_base = OTHER; note = 2'-O-methyladenosine-3'-phosphorothioate
  modified_base 2: mod_base = OTHER; note = 2'-fluoroadenosine-3'-phosphorothioate
  modified_base 3: mod_base = OTHER; note = 2'-O-methyladenosine-3'-phosphate
  modified_base 4: mod_base = OTHER; note = 2'-O-methyladenosine-3'-phosphate
  modified_base 5: mod_base = OTHER; note = 2'-O-methylcytidine-3'-phosphate
  modified_base 6: mod_base = OTHER; note = 2'-O-methyladenosine-3'-phosphate
  modified_base 7: mod_base = OTHER; note = Guanosine-glycol nucleic acid (GNA)
  modified_base 8: mod_base = OTHER; note = 2'-O-methyladenosine-3'-phosphate
  modified_base 9: mod_base = OTHER; note = 2'-O-methylguanosine-3'-phosphate
  modified_base 10: mod_base = OTHER; note = 2'-O-methylcytidine-3'-phosphate
  modified_base 11: mod_base = OTHER; note = 2'-O-methyluridine-3'-phosphate
  modified_base 12: mod_base = OTHER; note = 2'-O-methyluridine-3'-phosphate
  modified_base 13: mod_base = OTHER; note = 2'-O-methyluridine-3'-phosphate
  modified_base 14: mod_base = OTHER; note = 2'-fluoroguanosine-3'-phosphate
  modified_base 15: mod_base = OTHER; note = 2'-O-methyladenosine-3'-phosphate
  modified_base 16: mod_base = OTHER; note = 2'-fluorocytidine-3'-phosphate
  modified_base 17: mod_base = OTHER; note = 2'-O-methyladenosine-3'-phosphate
  modified_base 18: mod_base = OTHER; note = 2'-O-methyluridine-3'-phosphate
  modified_base 19: mod_base = OTHER; note = 2'-O-methylcytidine-3'-phosphate
  modified_base 20: mod_base = OTHER; note = 2'-O-methylcytidine-3'-phosphate
  modified_base 21: mod_base = OTHER; note = 2'-O-methyluridine-3'-phosphorothioate
  modified_base 22: mod_base = OTHER; note = 2'-O-methyluridine-3'-phosphorothioate
  modified_base 23: mod_base = OTHER; note = 2'-O-methylcytidine-3'-phosphate
aaaacagagctttgacatccttc

SEQ ID NO: 966 - RNA, 23 nt, synthetic construct
  misc_feature 1..23: note = Description of Artificial Sequence: Synthetic oligonucleotide
  source 1..23: mol_type = other RNA
  modified_base 1: mod_base = OTHER; note = 2'-O-methyladenosine-3'-phosphorothioate
  modified_base 2: mod_base = OTHER; note = 2'-fluorocytidine-3'-phosphorothioate
  modified_base 3: mod_base = OTHER; note = 2'-O-methylcytidine-3'-phosphate
  modified_base 4: mod_base = OTHER; note = 2'-O-methyluridine-3'-phosphate
  modified_base 5: mod_base = OTHER; note = 2'-O-methyluridine-3'-phosphate
  modified_base 6: mod_base = OTHER; note = 2'-O-methylguanosine-3'-phosphate
  modified_base 7: mod_base = OTHER; note = Adenosine-glycol nucleic acid (GNA)
  modified_base 8: mod_base = OTHER; note = 2'-O-methylcytidine-3'-phosphate
  modified_base 9: mod_base = OTHER; note = 2'-O-methyluridine-3'-phosphate
  modified_base 10: mod_base = OTHER; note = 2'-O-methyluridine-3'-phosphate
  modified_base 11: mod_base = OTHER; note = 2'-O-methyluridine-3'-phosphate
  modified_base 12: mod_base = OTHER; note = 2'-O-methyladenosine-3'-phosphate
  modified_base 13: mod_base = OTHER; note = 2'-O-methyladenosine-3'-phosphate
  modified_base 14: mod_base = OTHER; note = 2'-fluoroadenosine-3'-phosphate
  modified_base 15: mod_base = OTHER; note = 2'-O-methylcytidine-3'-phosphate
  modified_base 16: mod_base = OTHER; note = 2'-fluoroadenosine-3'-phosphate
  modified_base 17: mod_base = OTHER; note = 2'-O-methylcytidine-3'-phosphate
  modified_base 18: mod_base = OTHER; note = 2'-O-methyladenosine-3'-phosphate
  modified_base 19: mod_base = OTHER; note = 2'-O-methyluridine-3'-phosphate
  modified_base 20: mod_base = OTHER; note = 2'-O-methylguanosine-3'-phosphate
  modified_base 21: mod_base = OTHER; note = 2'-O-methyladenosine-3'-phosphorothioate
  modified_base 22: mod_base = OTHER; note = 2'-O-methyluridine-3'-phosphorothioate
  modified_base 23: mod_base = OTHER; note = 2'-O-methylguanosine-3'-phosphate
accttgactttaaacacatgatg

SEQ ID NO: 967 - RNA, 23 nt, synthetic construct
  misc_feature 1..23: note = Description of Artificial Sequence: Synthetic oligonucleotide
  source 1..23: mol_type = other RNA
  modified_base 1: mod_base = OTHER; note = 2'-O-methyladenosine-3'-phosphorothioate
  modified_base 2: mod_base = OTHER; note = 2'-fluoroadenosine-3'-phosphorothioate
  modified_base 3: mod_base = OTHER; note = 2'-O-methylguanosine-3'-phosphate
  modified_base 4: mod_base = OTHER; note = 2'-O-methyluridine-3'-phosphate
  modified_base 5: mod_base = OTHER; note = 2'-O-methylguanosine-3'-phosphate
  modified_base 6: mod_base = OTHER; note = 2'-O-methyladenosine-3'-phosphate
  modified_base 7: mod_base = OTHER; note = Cytidine-glycol nucleic acid (GNA)
  modified_base 8: mod_base = OTHER; note = 2'-O-methyluridine-3'-phosphate
  modified_base 9: mod_base = OTHER; note = 2'-O-methylguanosine-3'-phosphate
  modified_base 10: mod_base = OTHER; note = 2'-O-methyladenosine-3'-phosphate
  modified_base 11: mod_base = OTHER; note = 2'-O-methylguanosine-3'-phosphate
  modified_base 12: mod_base = OTHER; note = 2'-O-methyladenosine-3'-phosphate
  modified_base 13: mod_base = OTHER; note = 2'-O-methyluridine-3'-phosphate
  modified_base 14: mod_base = OTHER; note = 2'-fluorocytidine-3'-phosphate
  modified_base 15: mod_base = OTHER; note = 2'-O-methyluridine-3'-phosphate
  modified_base 16: mod_base = OTHER; note = 2'-fluorouridine-3'-phosphate
  modified_base 17: mod_base = OTHER; note = 2'-O-methylguanosine-3'-phosphate
  modified_base 18: mod_base = OTHER; note = 2'-O-methylguanosine-3'-phosphate
  modified_base 19: mod_base = OTHER; note = 2'-O-methylcytidine-3'-phosphate
  modified_base 20: mod_base = OTHER; note = 2'-O-methyluridine-3'-phosphate
  modified_base 21: mod_base = OTHER; note = 2'-O-methyluridine-3'-phosphorothioate
  modified_base 22: mod_base = OTHER; note = 2'-O-methylguanosine-3'-phosphorothioate
  modified_base 23: mod_base = OTHER; note = 2'-O-methylcytidine-3'-phosphate
aagtgactgagatcttggcttgc

SEQ ID NO: 968 - RNA, 23 nt, synthetic construct
  misc_feature 1..23: note = Description of Artificial Sequence: Synthetic oligonucleotide
  source 1..23: mol_type = other RNA
  modified_base 1: mod_base = OTHER; note = 2'-O-methyladenosine-3'-phosphorothioate
  modified_base 2: mod_base = OTHER; note = 2'-fluoroadenosine-3'-phosphorothioate
  modified_base 3: mod_base = OTHER; note = 2'-O-methylcytidine-3'-phosphate
  modified_base 4: mod_base = OTHER; note = 2'-O-methylcytidine-3'-phosphate
  modified_base 5: mod_base = OTHER; note = 2'-O-methylcytidine-3'-phosphate
  modified_base 6: mod_base = OTHER; note = 2'-O-methyladenosine-3'-phosphate
  modified_base 7: mod_base = OTHER; note = Adenosine-glycol nucleic acid (GNA)
  modified_base 8: mod_base = OTHER; note = 2'-O-methyladenosine-3'-phosphate
  modified_base 9: mod_base = OTHER; note = 2'-O-methyluridine-3'-phosphate
  modified_base 10: mod_base = OTHER; note = 2'-O-methylcytidine-3'-phosphate
  modified_base 11: mod_base = OTHER; note = 2'-O-methylcytidine-3'-phosphate
  modified_base 12: mod_base = OTHER; note = 2'-O-methyluridine-3'-phosphate
  modified_base 13: mod_base = OTHER; note = 2'-O-methylcytidine-3'-phosphate
  modified_base 14: mod_base = OTHER; note = 2'-fluoroadenosine-3'-phosphate
  modified_base 15: mod_base = OTHER; note = 2'-O-methyluridine-3'-phosphate
  modified_base 16: mod_base = OTHER; note = 2'-fluorocytidine-3'-phosphate
  modified_base 17: mod_base = OTHER; note = 2'-O-methyluridine-3'-phosphate
  modified_base 18: mod_base = OTHER; note = 2'-O-methyluridine-3'-phosphate
  modified_base 19: mod_base = OTHER; note = 2'-O-methyluridine-3'-phosphate
  modified_base 20: mod_base = OTHER; note = 2'-O-methylguanosine-3'-phosphate
  modified_base 21: mod_base = OTHER; note = 2'-O-methyladenosine-3'-phosphorothioate
  modified_base 22: mod_base = OTHER; note = 2'-O-methylguanosine-3'-phosphorothioate
  modified_base 23: mod_base = OTHER; note = 2'-O-methylcytidine-3'-phosphate
aacccaaatcctcatctttgagc

SEQ ID NO: 969 - DNA, 23 bp, synthetic construct
  misc_feature 1..23: note = Description of Artificial Sequence: Synthetic oligonucleotide
  source 1..23: mol_type = other DNA
  modified_base 1: mod_base = OTHER; note = 2'-O-methyladenosine-3'-phosphorothioate
  modified_base 2: mod_base = OTHER; note = 2'-fluoroguanosine-3'-phosphorothioate
  modified_base 3: mod_base = OTHER; note = 2'-O-methylcytidine-3'-phosphate
  modified_base 4: mod_base = OTHER; note = 2'-O-methylguanosine-3'-phosphate
  modified_base 5: mod_base = OTHER; note = 2'-O-methyladenosine-3'-phosphate
  modified_base 6: mod_base = OTHER; note = 2'-O-methylguanosine-3'-phosphate
  modified_base 7: mod_base = OTHER; note = Thymidine-glycol nucleic acid (GNA) S-Isomer
  modified_base 8: mod_base = OTHER; note = 2'-O-methylguanosine-3'-phosphate
  modified_base 9: mod_base = OTHER; note = 2'-O-methyladenosine-3'-phosphate
  modified_base 10: mod_base = OTHER; note = 2'-O-methylcytidine-3'-phosphate
  modified_base 11: mod_base = OTHER; note = 2'-O-methyluridine-3'-phosphate
  modified_base 12: mod_base = OTHER; note = 2'-O-methylguanosine-3'-phosphate
  modified_base 13: mod_base = OTHER; note = 2'-O-methyladenosine-3'-phosphate
  modified_base 14: mod_base = OTHER; note = 2'-fluoroguanosine-3'-phosphate
  modified_base 15: mod_base = OTHER; note = 2'-O-methyladenosine-3'-phosphate
  modified_base 16: mod_base = OTHER; note = 2'-fluorouridine-3'-phosphate
  modified_base 17: mod_base = OTHER; note = 2'-O-methylcytidine-3'-phosphate
  modified_base 18: mod_base = OTHER; note = 2'-O-methyluridine-3'-phosphate
  modified_base 19: mod_base = OTHER; note = 2'-O-methyluridine-3'-phosphate
  modified_base 20: mod_base = OTHER; note = 2'-O-methylguanosine-3'-phosphate
  modified_base 21: mod_base = OTHER; note = 2'-O-methylguanosine-3'-phosphorothioate
  modified_base 22: mod_base = OTHER; note = 2'-O-methylcytidine-3'-phosphorothioate
  modified_base 23: mod_base = OTHER; note = 2'-O-methyluridine-3'-phosphate
  misc_feature 1..6: note = RNA
  misc_feature 7: note = DNA
  misc_feature 8..23: note = RNA
agcgagtgactgagatcttggct

SEQ ID NO: 970 - DNA, 23 bp, synthetic construct
  misc_feature 1..23: note = Description of Artificial Sequence: Synthetic oligonucleotide
  source 1..23: mol_type = other DNA
  modified_base 1: mod_base = OTHER; note = 2'-O-methyladenosine-3'-phosphorothioate
  modified_base 2: mod_base = OTHER; note = 2'-fluorocytidine-3'-phosphorothioate
  modified_base 3: mod_base = OTHER; note = 2'-O-methyluridine-3'-phosphate
  modified_base 4: mod_base = OTHER; note = 2'-O-methylguanosine-3'-phosphate
  modified_base 5: mod_base = OTHER; note = 2'-O-methyluridine-3'-phosphate
  modified_base 6: mod_base = OTHER; note = 2'-O-methylcytidine-3'-phosphate
  modified_base 7: mod_base = OTHER; note = Thymidine-glycol nucleic acid (GNA) S-Isomer
  modified_base 8: mod_base = OTHER; note = 2'-O-methylguanosine-3'-phosphate
  modified_base 9: mod_base = OTHER; note = 2'-O-methyladenosine-3'-phosphate
  modified_base 10: mod_base = OTHER; note = 2'-O-methyluridine-3'-phosphate
  modified_base 11: mod_base = OTHER; note = 2'-O-methylcytidine-3'-phosphate
  modified_base 12: mod_base = OTHER; note = 2'-O-methylcytidine-3'-phosphate
  modified_base 13: mod_base = OTHER; note = 2'-O-methyladenosine-3'-phosphate
  modified_base 14: mod_base = OTHER; note = 2'-fluorouridine-3'-phosphate
  modified_base 15: mod_base = OTHER; note = 2'-O-methylcytidine-3'-phosphate
  modified_base 16: mod_base = OTHER; note = 2'-fluorouridine-3'-phosphate
  modified_base 17: mod_base = OTHER; note = 2'-O-methyladenosine-3'-phosphate
  modified_base 18: mod_base = OTHER; note = 2'-O-methylguanosine-3'-phosphate
  modified_base 19: mod_base = OTHER; note = 2'-O-methylcytidine-3'-phosphate
  modified_base 20: mod_base = OTHER; note = 2'-O-methyladenosine-3'-phosphate
  modified_base 21: mod_base = OTHER; note = 2'-O-methylcytidine-3'-phosphorothioate
  modified_base 22: mod_base = OTHER; note = 2'-O-methylcytidine-3'-phosphorothioate
  modified_base 23: mod_base = OTHER; note = 2'-O-methyladenosine-3'-phosphate
  misc_feature 1..6: note = RNA
  misc_feature 7: note = DNA
  misc_feature 8..23: note = RNA
actgtctgatccatctagcacca

SEQ ID NO: 971 - RNA, 23 nt, synthetic construct
  misc_feature 1..23: note = Description of Artificial Sequence: Synthetic oligonucleotide
  source 1..23: mol_type = other RNA
  modified_base 1: mod_base = OTHER; note = 2'-O-methyladenosine-3'-phosphorothioate
  modified_base 2: mod_base = OTHER; note = 2'-fluorocytidine-3'-phosphorothioate
  modified_base 3: mod_base = OTHER; note = 2'-O-methyladenosine-3'-phosphate
  modified_base 4: mod_base = OTHER; note = 2'-O-methylcytidine-3'-phosphate
  modified_base 5: mod_base = OTHER; note = 2'-O-methyladenosine-3'-phosphate
  modified_base 6: mod_base = OTHER; note = 2'-O-methylguanosine-3'-phosphate
  modified_base 7: mod_base = OTHER; note = Adenosine-glycol nucleic acid (GNA)
  modified_base 8: mod_base = OTHER; note = 2'-O-methylguanosine-3'-phosphate
  modified_base 9: mod_base = OTHER; note = 2'-O-methyladenosine-3'-phosphate
  modified_base 10: mod_base = OTHER; note = 2'-O-methylcytidine-3'-phosphate
  modified_base 11: mod_base = OTHER; note = 2'-O-methyluridine-3'-phosphate
  modified_base 12: mod_base = OTHER; note = 2'-O-methylcytidine-3'-phosphate
  modified_base 13: mod_base = OTHER; note = 2'-O-methyladenosine-3'-phosphate
  modified_base 14: mod_base = OTHER; note = 2'-fluoroguanosine-3'-phosphate
  modified_base 15: mod_base = OTHER; note = 2'-O-methyladenosine-3'-phosphate
  modified_base 16: mod_base = OTHER; note = 2'-fluoroguanosine-3'-phosphate
  modified_base 17: mod_base = OTHER; note = 2'-O-methyladenosine-3'-phosphate
  modified_base 18: mod_base = OTHER; note = 2'-O-methyluridine-3'-phosphate
  modified_base 19: mod_base = OTHER; note = 2'-O-methyluridine-3'-phosphate
  modified_base 20: mod_base = OTHER; note = 2'-O-methyluridine-3'-phosphate
  modified_base 21: mod_base = OTHER; note = 2'-O-methylguanosine-3'-phosphorothioate
  modified_base 22: mod_base = OTHER; note = 2'-O-methylguanosine-3'-phosphorothioate
  modified_base 23: mod_base = OTHER; note = 2'-O-methyluridine-3'-phosphate
acacagagactcagagatttggt

SEQ ID NO: 972 - RNA, 23 nt, synthetic construct
  misc_feature 1..23: note = Description of Artificial Sequence: Synthetic oligonucleotide
  source 1..23: mol_type = other RNA
  modified_base 1: mod_base = OTHER; note = 2'-O-methyladenosine-3'-phosphorothioate
  modified_base 2: mod_base = OTHER; note = 2'-fluoroguanosine-3'-phosphorothioate
  modified_base 3: mod_base = OTHER; note = 2'-O-methylcytidine-3'-phosphate
  modified_base 4: mod_base = OTHER; note = 2'-O-methyluridine-3'-phosphate
  modified_base 5: mod_base = OTHER; note = 2'-O-methylguanosine-3'-phosphate
  modified_base 6: mod_base = OTHER; note = 2'-O-methyluridine-3'-phosphate
  modified_base 7: mod_base = OTHER; note = Cytidine-glycol nucleic acid (GNA)
  modified_base 8: mod_base = OTHER; note = 2'-O-methyluridine-3'-phosphate
  modified_base 9: mod_base = OTHER; note = 2'-O-methylguanosine-3'-phosphate
  modified_base 10: mod_base = OTHER; note = 2'-O-methyladenosine-3'-phosphate
  modified_base 11: mod_base = OTHER; note = 2'-O-methyluridine-3'-phosphate
  modified_base 12: mod_base = OTHER; note = 2'-O-methylcytidine-3'-phosphate
  modified_base 13: mod_base = OTHER; note = 2'-O-methylcytidine-3'-phosphate
  modified_base 14: mod_base = OTHER; note = 2'-fluoroadenosine-3'-phosphate
  modified_base 15: mod_base = OTHER; note = 2'-O-methyluridine-3'-phosphate
  modified_base 16: mod_base = OTHER; note = 2'-fluorocytidine-3'-phosphate
  modified_base 17: mod_base = OTHER; note = 2'-O-methyluridine-3'-phosphate
  modified_base 18: mod_base = OTHER; note = 2'-O-methyladenosine-3'-phosphate
  modified_base 19: mod_base = OTHER; note = 2'-O-methylguanosine-3'-phosphate
  modified_base 20: mod_base = OTHER; note = 2'-O-methylcytidine-3'-phosphate
  modified_base 21: mod_base = OTHER; note = 2'-O-methyladenosine-3'-phosphorothioate
  modified_base 22: mod_base = OTHER; note = 2'-O-methylcytidine-3'-phosphorothioate
  modified_base 23: mod_base = OTHER; note = 2'-O-methylcytidine-3'-phosphate
agctgtctgatccatctagcacc

SEQ ID NO: 973 - RNA, 23 nt, synthetic construct
  misc_feature 1..23: note = Description of Artificial Sequence: Synthetic oligonucleotide
  source 1..23: mol_type = other RNA
  modified_base 1: mod_base = OTHER; note = 2'-O-methyladenosine-3'-phosphorothioate
  modified_base 2: mod_base = OTHER; note = 2'-fluorocytidine-3'-phosphorothioate
  modified_base 3: mod_base = OTHER; note = 2'-O-methylcytidine-3'-phosphate
  modified_base 4: mod_base = OTHER; note = 2'-O-methyluridine-3'-phosphate
  modified_base 5: mod_base = OTHER; note = 2'-O-methylguanosine-3'-phosphate
  modified_base 6: mod_base = OTHER; note = 2'-O-methyladenosine-3'-phosphate
  modified_base 7: mod_base = OTHER; note = Cytidine-glycol nucleic acid (GNA)
  modified_base 8: mod_base = OTHER; note = 2'-O-methyluridine-3'-phosphate
  modified_base 9: mod_base = OTHER; note = 2'-O-methyluridine-3'-phosphate
  modified_base 10: mod_base = OTHER; note = 2'-O-methylcytidine-3'-phosphate
  modified_base 11: mod_base = OTHER; note = 2'-O-methyladenosine-3'-phosphate
  modified_base 12: mod_base = OTHER; note = 2'-O-methylguanosine-3'-phosphate
  modified_base 13: mod_base = OTHER; note = 2'-O-methylcytidine-3'-phosphate
  modified_base 14: mod_base = OTHER; note = 2'-fluorouridine-3'-phosphate
  modified_base 15: mod_base = OTHER; note = 2'-O-methyluridine-3'-phosphate
  modified_base 16: mod_base = OTHER; note = 2'-fluoroguanosine-3'-phosphate
  modified_base 17: mod_base = OTHER; note = 2'-O-methyluridine-3'-phosphate
  modified_base 18: mod_base = OTHER; note = 2'-O-methylguanosine-3'-phosphate
  modified_base 19: mod_base = OTHER; note = 2'-O-methylguanosine-3'-phosphate
  modified_base 20: mod_base = OTHER; note = 2'-O-methyluridine-3'-phosphate
  modified_base 21: mod_base = OTHER; note = 2'-O-methylcytidine-3'-phosphorothioate
  modified_base 22: mod_base = OTHER; note = 2'-O-methyluridine-3'-phosphorothioate
  modified_base 23: mod_base = OTHER; note = 2'-O-methyluridine-3'-phosphate
acctgacttcagcttgtggtctt

SEQ ID NO: 974 - DNA, 23 bp, synthetic construct
  misc_feature 1..23: note = Description of Artificial Sequence: Synthetic oligonucleotide
  source 1..23: mol_type = other DNA
  modified_base 1: mod_base = OTHER; note = 2'-O-methyladenosine-3'-phosphorothioate
  modified_base 2: mod_base = OTHER; note = 2'-fluorocytidine-3'-phosphorothioate
  modified_base 3: mod_base = OTHER; note = 2'-O-methylcytidine-3'-phosphate
  modified_base 4: mod_base = OTHER; note = 2'-O-methyladenosine-3'-phosphate
  modified_base 5: mod_base = OTHER; note = 2'-O-methyluridine-3'-phosphate
  modified_base 6: mod_base = OTHER; note = 2'-O-methyladenosine-3'-phosphate
  modified_base 7: mod_base = OTHER; note = Thymidine-glycol nucleic acid (GNA) S-Isomer
  modified_base 8: mod_base = OTHER; note = 2'-O-methylcytidine-3'-phosphate
  modified_base 9: mod_base = OTHER; note = 2'-O-methylcytidine-3'-phosphate
  modified_base 10: mod_base = OTHER; note = 2'-O-methyluridine-3'-phosphate
  modified_base 11: mod_base = OTHER; note = 2'-O-methyluridine-3'-phosphate
  modified_base 12: mod_base = OTHER; note = 2'-O-methylguanosine-3'-phosphate
  modified_base 13: mod_base = OTHER; note = 2'-O-methyladenosine-3'-phosphate
  modified_base 14: mod_base = OTHER; note = 2'-fluorocytidine-3'-phosphate
  modified_base 15: mod_base = OTHER; note = 2'-O-methyluridine-3'-phosphate
  modified_base 16: mod_base = OTHER; note = 2'-fluorouridine-3'-phosphate
  modified_base 17: mod_base = OTHER; note = 2'-O-methyluridine-3'-phosphate
  modified_base 18: mod_base = OTHER; note = 2'-O-methyladenosine-3'-phosphate
  modified_base 19: mod_base = OTHER; note = 2'-O-methyladenosine-3'-phosphate
  modified_base 20: mod_base = OTHER; note = 2'-O-methyladenosine-3'-phosphate
  modified_base 21: mod_base = OTHER; note = 2'-O-methylcytidine-3'-phosphorothioate
  modified_base 22: mod_base = OTHER; note = 2'-O-methyladenosine-3'-phosphorothioate
  modified_base 23: mod_base = OTHER; note = 2'-O-methylcytidine-3'-phosphate
  misc_feature 1..6: note = RNA
  misc_feature 7: note = DNA
  misc_feature 8..23: note = RNA
accatatccttgactttaaacac

SEQ ID NO: 975 - RNA, 23 nt, synthetic construct
  misc_feature 1..23: note = Description of Artificial Sequence: Synthetic oligonucleotide
  source 1..23: mol_type = other RNA
  modified_base 1: mod_base = OTHER; note = 2'-O-methyladenosine-3'-phosphorothioate
  modified_base 2: mod_base = OTHER; note = 2'-fluorocytidine-3'-phosphorothioate
  modified_base 3: mod_base = OTHER; note = 2'-O-methyladenosine-3'-phosphate
  modified_base 4: mod_base = OTHER; note = 2'-O-methyladenosine-3'-phosphate
  modified_base 5: mod_base = OTHER; note = 2'-O-methyladenosine-3'-phosphate
  modified_base 6: mod_base = OTHER; note = 2'-O-methyluridine-3'-phosphate
  modified_base 7: mod_base = OTHER; note = Cytidine-glycol nucleic acid (GNA)
  modified_base 8: mod_base = OTHER; note = 2'-O-methylcytidine-3'-phosphate
  modified_base 9: mod_base = OTHER; note = 2'-O-methyluridine-3'-phosphate
  modified_base 10: mod_base = OTHER; note = 2'-O-methylcytidine-3'-phosphate
  modified_base 11: mod_base = OTHER; note = 2'-O-methyladenosine-3'-phosphate
  modified_base 12: mod_base = OTHER; note = 2'-O-methyluridine-3'-phosphate
  modified_base 13: mod_base = OTHER; note = 2'-O-methylcytidine-3'-phosphate
  modified_base 14: mod_base = OTHER; note = 2'-fluorouridine-3'-phosphate
  modified_base 15: mod_base = OTHER; note = 2'-O-methyluridine-3'-phosphate
  modified_base 16: mod_base = OTHER; note = 2'-fluorouridine-3'-phosphate
  modified_base 17: mod_base = OTHER; note = 2'-O-methylguanosine-3'-phosphate
  modified_base 18: mod_base = OTHER; note = 2'-O-methyladenosine-3'-phosphate
  modified_base 19: mod_base = OTHER; note = 2'-O-methylguanosine-3'-phosphate
  modified_base 20: mod_base = OTHER; note = 2'-O-methylcytidine-3'-phosphate
  modified_base 21: mod_base = OTHER; note = 2'-O-methyluridine-3'-phosphorothioate
  modified_base 22: mod_base = OTHER; note = 2'-O-methyluridine-3'-phosphorothioate
  modified_base 23: mod_base = OTHER; note = 2'-O-methylguanosine-3'-phosphate
acaaatcctcatctttgagcttg

SEQ ID NO: 976 - RNA, 23 nt, synthetic construct
  misc_feature 1..23: note = Description of Artificial Sequence: Synthetic oligonucleotide
  source 1..23: mol_type = other RNA
  modified_base 1: mod_base = OTHER; note = 2'-O-methyladenosine-3'-phosphorothioate
  modified_base 2: mod_base = OTHER; note = 2'-fluorocytidine-3'-phosphorothioate
  modified_base 3: mod_base = OTHER; note = 2'-O-methylcytidine-3'-phosphate
  modified_base 4: mod_base = OTHER; note = 2'-O-methyluridine-3'-phosphate
  modified_base 5: mod_base = OTHER; note = 2'-O-methyluridine-3'-phosphate
  modified_base 6: mod_base = OTHER; note = 2'-O-methyluridine-3'-phosphate
  modified_base 7: mod_base = OTHER; note = Guanosine-glycol nucleic acid (GNA)
  modified_base 8: mod_base = OTHER; note = 2'-O-methyladenosine-3'-phosphate
  modified_base 9: mod_base = OTHER; note = 2'-O-methyluridine-3'-phosphate
  modified_base 10: mod_base = OTHER; note = 2'-O-methylcytidine-3'-phosphate
  modified_base 11: mod_base = OTHER; note = 2'-O-methyluridine-3'-phosphate
  modified_base 12: mod_base = OTHER; note = 2'-O-methylcytidine-3'-phosphate
  modified_base 13: mod_base = OTHER; note = 2'-O-methyluridine-3'-phosphate
  modified_base 14: mod_base = OTHER; note = 2'-fluoroadenosine-3'-phosphate
  modified_base 15: mod_base = OTHER; note = 2'-O-methylcytidine-3'-phosphate
  modified_base 16: mod_base = OTHER; note = 2'-fluorouridine-3'-phosphate
  modified_base 17: mod_base = OTHER; note = 2'-O-methylcytidine-3'-phosphate
  modified_base 18: mod_base = OTHER; note = 2'-O-methylcytidine-3'-phosphate
  modified_base 19: mod_base = OTHER; note = 2'-O-methylcytidine-3'-phosphate
  modified_base 20: mod_base = OTHER; note = 2'-O-methyluridine-3'-phosphate
  modified_base 21: mod_base = OTHER; note = 2'-O-methylcytidine-3'-phosphorothioate
  modified_base 22: mod_base = OTHER; note = 2'-O-methylcytidine-3'-phosphorothioate
  modified_base 23: mod_base = OTHER; note = 2'-O-methyladenosine-3'-phosphate
acctttgatctctactccctcca

SEQ ID NO: 977 - RNA, 23 nt, synthetic construct
  misc_feature 1..23: note = Description of Artificial Sequence: Synthetic oligonucleotide
  source 1..23: mol_type = other RNA
  modified_base 1: mod_base = OTHER; note = 2'-O-methyladenosine-3'-phosphorothioate
  modified_base 2: mod_base = OTHER; note = 2'-fluorouridine -3'-phosphorothioate
  modified_base 3: mod_base = OTHER; note = 2'-O-methyluridine-3'-phosphate
  modified_base 4: mod_base = OTHER; note = 2'-O-methylcytidine-3'-phosphate
  modified_base 5: mod_base = OTHER; note = 2'-O-methyladenosine-3'-phosphate
  modified_base 6: mod_base = OTHER; note = 2'-O-methyluridine-3'-phosphate
  modified_base 7: mod_base = OTHER; note = Cytidine-glycol nucleic acid (GNA)
  modified_base 8: mod_base = OTHER; note = 2'-O-methyladenosine-3'-phosphate
  modified_base 9: mod_base = OTHER; note = 2'-O-methyladenosine-3'-phosphate
  modified_base 10: mod_base = OTHER; note = 2'-O-methyluridine-3'-phosphate
  modified_base 11: mod_base = OTHER; note = 2'-O-methylcytidine-3'-phosphate
  modified_base 12: mod_base = OTHER; note = 2'-O-methyladenosine-3'-phosphate
  modified_base 13: mod_base = OTHER; note = 2'-O-methyluridine-3'-phosphate
  modified_base 14: mod_base = OTHER; note = 2'-fluorouridine-3'-phosphate
  modified_base 15: mod_base = OTHER; note = 2'-O-methyluridine-3'-phosphate
  modified_base 16: mod_base = OTHER; note = 2'-fluoroguanosine-3'-phosphate
  modified_base 17: mod_base = OTHER; note = 2'-O-methylguanosine-3'-phosphate
  modified_base 18: mod_base = OTHER; note = 2'-O-methyluridine-3'-phosphate
  modified_base 19: mod_base = OTHER; note = 2'-O-methyladenosine-3'-phosphate
  modified_base 20: mod_base = OTHER; note = 2'-O-methylguanosine-3'-phosphate
  modified_base 21: mod_base = OTHER; note = 2'-O-methyladenosine-3'-phosphorothioate
  modified_base 22: mod_base = OTHER; note = 2'-O-methyladenosine-3'-phosphorothioate
  modified_base 23: mod_base = OTHER; note = 2'-O-methyladenosine-3'-phosphate
attcatcaatcatttggtagaaa

SEQ ID NO: 978 - RNA, 23 nt, synthetic construct
  misc_feature 1..23: note = Description of Artificial Sequence: Synthetic oligonucleotide
  source 1..23: mol_type = other RNA
  modified_base 1: mod_base = OTHER; note = 2'-O-methyladenosine-3'-phosphorothioate
  modified_base 2: mod_base = OTHER; note = 2'-fluorocytidine-3'-phosphorothioate
  modified_base 3: mod_base = OTHER; note = 2'-O-methylcytidine-3'-phosphate
  modified_base 4: mod_base = OTHER; note = 2'-O-methylcytidine-3'-phosphate
  modified_base 5: mod_base = OTHER; note = 2'-O-methyladenosine-3'-phosphate
  modified_base 6: mod_base = OTHER; note = 2'-O-methyladenosine-3'-phosphate
  modified_base 7: mod_base = OTHER; note = Adenosine-glycol nucleic acid (GNA)
  modified_base 8: mod_base = OTHER; note = 2'-O-methyluridine-3'-phosphate
  modified_base 9: mod_base = OTHER; note = 2'-O-methylcytidine-3'-phosphate
  modified_base 10: mod_base = OTHER; note = 2'-O-methylcytidine-3'-phosphate
  modified_base 11: mod_base = OTHER; note = 2'-O-methyluridine-3'-phosphate
  modified_base 12: mod_base = OTHER; note = 2'-O-methylcytidine-3'-phosphate
  modified_base 13: mod_base = OTHER; note = 2'-O-methyladenosine-3'-phosphate
  modified_base 14: mod_base = OTHER; note = 2'-fluorouridine-3'-phosphate
  modified_base 15: mod_base = OTHER; note = 2'-O-methylcytidine-3'-phosphate
  modified_base 16: mod_base = OTHER; note = 2'-fluorouridine-3'-phosphate
  modified_base 17: mod_base = OTHER; note = 2'-O-methyluridine-3'-phosphate
  modified_base 18: mod_base = OTHER; note = 2'-O-methyluridine-3'-phosphate
  modified_base 19: mod_base = OTHER; note = 2'-O-methylguanosine-3'-phosphate
  modified_base 20: mod_base = OTHER; note = 2'-O-methyladenosine-3'-phosphate
  modified_base 21: mod_base = OTHER; note = 2'-O-methylguanosine-3'-phosphorothioate
  modified_base 22: mod_base = OTHER; note = 2'-O-methylcytidine-3'-phosphorothioate
  modified_base 23: mod_base = OTHER; note = 2'-O-methyluridine-3'-phosphate
acccaaatcctcatctttgagct

SEQ ID NO: 979 - RNA, 23 nt, synthetic construct
  misc_feature 1..23: note = Description of Artificial Sequence: Synthetic oligonucleotide
  source 1..23: mol_type = other RNA
  modified_base 1: mod_base = OTHER; note = 2'-O-methyladenosine-3'-phosphorothioate
  modified_base 2: mod_base = OTHER; note = 2'-fluoroadenosine-3'-phosphorothioate
  modified_base 3: mod_base = OTHER; note = 2'-O-methylcytidine-3'-phosphate
  modified_base 4: mod_base = OTHER; note = 2'-O-methyladenosine-3'-phosphate
  modified_base 5: mod_base = OTHER; note = 2'-O-methyluridine-3'-phosphate
  modified_base 6: mod_base = OTHER; note = 2'-O-methylguanosine-3'-phosphate
  modified_base 7: mod_base = OTHER; note = Adenosine-glycol nucleic acid (GNA)
  modified_base 8: mod_base = OTHER; note = 2'-O-methyladenosine-3'-phosphate
  modified_base 9: mod_base = OTHER; note = 2'-O-methylguanosine-3'-phosphate
  modified_base 10: mod_base = OTHER; note = 2'-O-methylguanosine-3'-phosphate
  modified_base 11: mod_base = OTHER; note = 2'-O-methyladenosine-3'-phosphate
  modified_base 12: mod_base = OTHER; note = 2'-O-methyladenosine-3'-phosphate
  modified_base 13: mod_base = OTHER; note = 2'-O-methyluridine-3'-phosphate
  modified_base 14: mod_base = OTHER; note = 2'-fluorocytidine-3'-phosphate
  modified_base 15: mod_base = OTHER; note = 2'-O-methyluridine-3'-phosphate
  modified_base 16: mod_base = OTHER; note = 2'-fluorouridine-3'-phosphate
  modified_base 17: mod_base = OTHER; note = 2'-O-methylguanosine-3'-phosphate
  modified_base 18: mod_base = OTHER; note = 2'-O-methylguanosine-3'-phosphate
  modified_base 19: mod_base = OTHER; note = 2'-O-methylcytidine-3'-phosphate
  modified_base 20: mod_base = OTHER; note = 2'-O-methyladenosine-3'-phosphate
  modified_base 21: mod_base = OTHER; note = 2'-O-methylguanosine-3'-phosphorothioate
  modified_base 22: mod_base = OTHER; note = 2'-O-methylguanosine-3'-phosphorothioate
  modified_base 23: mod_base = OTHER; note = 2'-O-methyladenosine-3'-phosphate
aacatgaaggaatcttggcagga

SEQ ID NO: 980 - RNA, 23 nt, synthetic construct
  misc_feature 1..23: note = Description of Artificial Sequence: Synthetic oligonucleotide
  source 1..23: mol_type = other RNA
  modified_base 1: mod_base = OTHER; note = 2'-O-methyladenosine-3'-phosphorothioate
  modified_base 2: mod_base = OTHER; note = 2'-fluorocytidine-3'-phosphorothioate
  modified_base 3: mod_base = OTHER; note = 2'-O-methyluridine-3'-phosphate
  modified_base 4: mod_base = OTHER; note = 2'-O-methylguanosine-3'-phosphate
  modified_base 5: mod_base = OTHER; note = 2'-O-methyladenosine-3'-phosphate
  modified_base 6: mod_base = OTHER; note = 2'-O-methylguanosine-3'-phosphate
  modified_base 7: mod_base = OTHER; note = Adenosine-glycol nucleic acid (GNA)
  modified_base 8: mod_base = OTHER; note = 2'-O-methyluridine-3'-phosphate
  modified_base 9: mod_base = OTHER; note = 2'-O-methylcytidine-3'-phosphate
  modified_base 10: mod_base = OTHER; note = 2'-O-methyluridine-3'-phosphate
  modified_base 11: mod_base = OTHER; note = 2'-O-methyluridine-3'-phosphate
  modified_base 12: mod_base = OTHER; note = 2'-O-methylguanosine-3'-phosphate
  modified_base 13: mod_base = OTHER; note = 2'-O-methylguanosine-3'-phosphate
  modified_base 14: mod_base = OTHER; note = 2'-fluorocytidine-3'-phosphate
  modified_base 15: mod_base = OTHER; note = 2'-O-methyluridine-3'-phosphate
  modified_base 16: mod_base = OTHER; note = 2'-fluorouridine-3'-phosphate
  modified_base 17: mod_base = OTHER; note = 2'-O-methylguanosine-3'-phosphate
  modified_base 18: mod_base = OTHER; note = 2'-O-methylcytidine-3'-phosphate
  modified_base 19: mod_base = OTHER; note = 2'-O-methylcytidine-3'-phosphate
  modified_base 20: mod_base = OTHER; note = 2'-O-methyladenosine-3'-phosphate
  modified_base 21: mod_base = OTHER; note = 2'-O-methyluridine-3'-phosphorothioate
  modified_base 22: mod_base = OTHER; note = 2'-O-methylguanosine-3'-phosphorothioate
  modified_base 23: mod_base = OTHER; note = 2'-O-methylguanosine-3'-phosphate
actgagatcttggcttgccatgg

SEQ ID NO: 981 - RNA, 23 nt, synthetic construct
  misc_feature 1..23: note = Description of Artificial Sequence: Synthetic oligonucleotide
  source 1..23: mol_type = other RNA
  modified_base 1: mod_base = OTHER; note = 2'-O-methyladenosine-3'-phosphorothioate
  modified_base 2: mod_base = OTHER; note = 2'-fluorocytidine-3'-phosphorothioate
  modified_base 3: mod_base = OTHER; note = 2'-O-methyladenosine-3'-phosphate
  modified_base 4: mod_base = OTHER; note = 2'-O-methyladenosine-3'-phosphate
  modified_base 5: mod_base = OTHER; note = 2'-O-methyladenosine-3'-phosphate
  modified_base 6: mod_base = OTHER; note = 2'-O-methylcytidine-3'-phosphate
  modified_base 7: mod_base = OTHER; note = Adenosine-glycol nucleic acid (GNA)
  modified_base 8: mod_base = OTHER; note = 2'-O-methylcytidine-3'-phosphate
  modified_base 9: mod_base = OTHER; note = 2'-O-methyladenosine-3'-phosphate
  modified_base 10: mod_base = OTHER; note = 2'-O-methyluridine-3'-phosphate
  modified_base 11: mod_base = OTHER; note = 2'-O-methyladenosine-3'-phosphate
  modified_base 12: mod_base = OTHER; note = 2'-O-methylcytidine-3'-phosphate
  modified_base 13: mod_base = OTHER; note = 2'-O-methyladenosine-3'-phosphate
  modified_base 14: mod_base = OTHER; note = 2'-fluorocytidine-3'-phosphate
  modified_base 15: mod_base = OTHER; note = 2'-O-methyladenosine-3'-phosphate
  modified_base 16: mod_base = OTHER; note = 2'-fluorouridine-3'-phosphate
  modified_base 17: mod_base = OTHER; note = 2'-O-methylcytidine-3'-phosphate
  modified_base 18: mod_base = OTHER; note = 2'-O-methylcytidine-3'-phosphate
  modified_base 19: mod_base = OTHER; note = 2'-O-methyladenosine-3'-phosphate
  modified_base 20: mod_base = OTHER; note = 2'-O-methylguanosine-3'-phosphate
  modified_base 21: mod_base = OTHER; note = 2'-O-methylguanosine-3'-phosphorothioate
  modified_base 22: mod_base = OTHER; note = 2'-O-methyluridine-3'-phosphorothioate
  modified_base 23: mod_base = OTHER; note = 2'-O-methyladenosine-3'-phosphate
acaaacacatacacatccaggta

SEQ ID NO: 982 - RNA, 23 nt, synthetic construct
  misc_feature 1..23: note = Description of Artificial Sequence: Synthetic oligonucleotide
  source 1..23: mol_type = other RNA
  modified_base 1: mod_base = OTHER; note = 2'-O-methyladenosine-3'-phosphorothioate
  modified_base 2: mod_base = OTHER; note = 2'-fluorocytidine-3'-phosphorothioate
  modified_base 3: mod_base = OTHER; note = 2'-O-methyladenosine-3'-phosphate
  modified_base 4: mod_base = OTHER; note = 2'-O-methyluridine-3'-phosphate
  modified_base 5: mod_base = OTHER; note = 2'-O-methyladenosine-3'-phosphate
  modified_base 6: mod_base = OTHER; note = 2'-O-methyluridine-3'-phosphate
  modified_base 7: mod_base = OTHER; note = Cytidine-glycol nucleic acid (GNA)
  modified_base 8: mod_base = OTHER; note = 2'-O-methylcytidine-3'-phosphate
  modified_base 9: mod_base = OTHER; note = 2'-O-methyluridine-3'-phosphate
  modified_base 10: mod_base = OTHER; note = 2'-O-methyluridine-3'-phosphate
  modified_base 11: mod_base = OTHER; note = 2'-O-methylguanosine-3'-phosphate
  modified_base 12: mod_base = OTHER; note = 2'-O-methyladenosine-3'-phosphate
  modified_base 13: mod_base = OTHER; note = 2'-O-methylcytidine-3'-phosphate
  modified_base 14: mod_base = OTHER; note = 2'-fluorouridine-3'-phosphate
  modified_base 15: mod_base = OTHER; note = 2'-O-methyluridine-3'-phosphate
  modified_base 16: mod_base = OTHER; note = 2'-fluorouridine-3'-phosphate
  modified_base 17: mod_base = OTHER; note = 2'-O-methyladenosine-3'-phosphate
  modified_base 18: mod_base = OTHER; note = 2'-O-methyladenosine-3'-phosphate
  modified_base 19: mod_base = OTHER; note = 2'-O-methyladenosine-3'-phosphate
  modified_base 20: mod_base = OTHER; note = 2'-O-methylcytidine-3'-phosphate
  modified_base 21: mod_base = OTHER; note = 2'-O-methyladenosine-3'-phosphorothioate
  modified_base 22: mod_base = OTHER; note = 2'-O-methylcytidine-3'-phosphorothioate
  modified_base 23: mod_base = OTHER; note = 2'-O-methyladenosine-3'-phosphate
acatatccttgactttaaacaca

SEQ ID NO: 983 - RNA, 23 nt, synthetic construct
  misc_feature 1..23: note = Description of Artificial Sequence: Synthetic oligonucleotide
  source 1..23: mol_type = other RNA
  modified_base 1: mod_base = OTHER; note = 2'-O-methyladenosine-3'-phosphorothioate
  modified_base 2: mod_base = OTHER; note = 2'-fluoroadenosine-3'-phosphorothioate
  modified_base 3: mod_base = OTHER; note = 2'-O-methylcytidine-3'-phosphate
  modified_base 4: mod_base = OTHER; note = 2'-O-methylcytidine-3'-phosphate
  modified_base 5: mod_base = OTHER; note = 2'-O-methyladenosine-3'-phosphate
  modified_base 6: mod_base = OTHER; note = 2'-O-methyladenosine-3'-phosphate
  modified_base 7: mod_base = OTHER; note = Cytidine-glycol nucleic acid (GNA)
  modified_base 8: mod_base = OTHER; note = 2'-O-methyluridine-3'-phosphate
  modified_base 9: mod_base = OTHER; note = 2'-O-methyluridine-3'-phosphate
  modified_base 10: mod_base = OTHER; note = 2'-O-methylguanosine-3'-phosphate
  modified_base 11: mod_base = OTHER; note = 2'-O-methyladenosine-3'-phosphate
  modified_base 12: mod_base = OTHER; note = 2'-O-methyladenosine-3'-phosphate
  modified_base 13: mod_base = OTHER; note = 2'-O-methyluridine-3'-phosphate
  modified_base 14: mod_base = OTHER; note = 2'-fluoroguanosine-3'-phosphate
  modified_base 15: mod_base = OTHER; note = 2'-O-methyladenosine-3'-phosphate
  modified_base 16: mod_base = OTHER; note = 2'-fluoroadenosine-3'-phosphate
  modified_base 17: mod_base = OTHER; note = 2'-O-methylguanosine-3'-phosphate
  modified_base 18: mod_base = OTHER; note = 2'-O-methylcytidine-3'-phosphate
  modified_base 19: mod_base = OTHER; note = 2'-O-methylguanosine-3'-phosphate
  modified_base 20: mod_base = OTHER; note = 2'-O-methylguanosine-3'-phosphate
  modified_base 21: mod_base = OTHER; note = 2'-O-methylcytidine-3'-phosphorothioate
  modified_base 22: mod_base = OTHER; note = 2'-O-methyluridine-3'-phosphorothioate
  modified_base 23: mod_base = OTHER; note = 2'-O-methyluridine-3'-phosphate
aaccaacttgaatgaagcggctt

SEQ ID NO: 984 - RNA, 23 nt, unidentified
  misc_feature 1..23: note = Description of Unknown: Target sequence
  source 1..23: mol_type = unassigned RNA
cctgccaagattccttcatgtat

SEQ ID NO: 985 - RNA, 23 nt, unidentified
  misc_feature 1..23: note = Description of Unknown: Target sequence
  source 1..23: mol_type = unassigned RNA
tcatgtgtttaaagtcaaggata

SEQ ID NO: 986 - RNA, 23 nt, unidentified
  misc_feature 1..23: note = Description of Unknown: Target sequence
  source 1..23: mol_type = unassigned RNA
tcaaagatgaggatttgggtttt

SEQ ID NO: 987 - RNA, 23 nt, unidentified
  misc_feature 1..23: note = Description of Unknown: Target sequence
  source 1..23: mol_type = unassigned RNA
tgaaggatgtcaaagctctgttt

SEQ ID NO: 988 - RNA, 23 nt, unidentified
  misc_feature 1..23: note = Description of Unknown: Target sequence
  source 1..23: mol_type = unassigned RNA
ttctaccaaatgattgatgaaac

SEQ ID NO: 989 - RNA, 23 nt, unidentified
  misc_feature 1..23: note = Description of Unknown: Target sequence
  source 1..23: mol_type = unassigned RNA
aaatcagttatgaagaccacaag

SEQ ID NO: 990 - RNA, 23 nt, unidentified
  misc_feature 1..23: note = Description of Unknown: Target sequence
  source 1..23: mol_type = unassigned RNA
ttttctaccaaatgattgatgaa

SEQ ID NO: 991 - RNA, 23 nt, unidentified
  misc_feature 1..23: note = Description of Unknown: Target sequence
  source 1..23: mol_type = unassigned RNA
catgtgtttaaagtcaaggatat

SEQ ID NO: 992 - RNA, 23 nt, unidentified
  misc_feature 1..23: note = Description of Unknown: Target sequence
  source 1..23: mol_type = unassigned RNA
ccaaatcagttatgaagaccaca

SEQ ID NO: 993 - RNA, 23 nt, unidentified
  misc_feature 1..23: note = Description of Unknown: Target sequence
  source 1..23: mol_type = unassigned RNA
aggatgtcaaagctctgtttgta

SEQ ID NO: 994 - RNA, 23 nt, unidentified
  misc_feature 1..23: note = Description of Unknown: Target sequence
  source 1..23: mol_type = unassigned RNA
agccagttgtgagagagatgcta

SEQ ID NO: 995 - RNA, 23 nt, unidentified
  misc_feature 1..23: note = Description of Unknown: Target sequence
  source 1..23: mol_type = unassigned RNA
caagccaagatctcagtcactcg

SEQ ID NO: 996 - RNA, 23 nt, unidentified
  misc_feature 1..23: note = Description of Unknown: Target sequence
  source 1..23: mol_type = unassigned RNA
gccgcttcattcaagttggtgtg

SEQ ID NO: 997 - RNA, 23 nt, unidentified
  misc_feature 1..23: note = Description of Unknown: Target sequence
  source 1..23: mol_type = unassigned RNA
atcatgtgtttaaagtcaaggat

SEQ ID NO: 998 - RNA, 23 nt, unidentified
  misc_feature 1..23: note = Description of Unknown: Target sequence
  source 1..23: mol_type = unassigned RNA
caaatcagttatgaagaccacaa

SEQ ID NO: 999 - RNA, 23 nt, unidentified
  misc_feature 1..23: note = Description of Unknown: Target sequence
  source 1..23: mol_type = unassigned RNA
gtgaaggatgtcaaagctctgtt

SEQ ID NO: 1000 - RNA, 23 nt, unidentified
  misc_feature 1..23: note = Description of Unknown: Target sequence
  source 1..23: mol_type = unassigned RNA
gaatgttttctaccaaatgattg

SEQ ID NO: 1001 - RNA, 23 nt, unidentified
  misc_feature 1..23: note = Description of Unknown: Target sequence
  source 1..23: mol_type = unassigned RNA
ggcaagccaagatctcagtcact

SEQ ID NO: 1002 - RNA, 23 nt, unidentified
  misc_feature 1..23: note = Description of Unknown: Target sequence
  source 1..23: mol_type = unassigned RNA
tcaccaacttgattgagaaggtg

SEQ ID NO: 1003 - RNA, 23 nt, unidentified
  misc_feature 1..23: note = Description of Unknown: Target sequence
  source 1..23: mol_type = unassigned RNA
aaggatgtcaaagctctgtttgt

SEQ ID NO: 1004 - RNA, 22 nt, unidentified
  misc_feature 1..22: note = Description of Unknown: Target sequence
  source 1..22: mol_type = unassigned RNA
aagatgaggatttgggttttct

SEQ ID NO: 1005 - RNA, 23 nt, unidentified
  misc_feature 1..23: note = Description of Unknown: Target sequence
  source 1..23: mol_type = unassigned RNA
aagccaagatctcagtcactcgc

SEQ ID NO: 1006 - RNA, 23 nt, unidentified
  misc_feature 1..23: note = Description of Unknown: Target sequence
  source 1..23: mol_type = unassigned RNA
agccgcttcattcaagttggtgt

SEQ ID NO: 1007 - RNA, 23 nt, unidentified
  misc_feature 1..23: note = Description of Unknown: Target sequence
  source 1..23: mol_type = unassigned RNA
aagccagttgtgagagagatgct

SEQ ID NO: 1008 - RNA, 23 nt, unidentified
  misc_feature 1..23: note = Description of Unknown: Target sequence
  source 1..23: mol_type = unassigned RNA
gctccatgaatatctacctggtg

SEQ ID NO: 1009 - RNA, 23 nt, unidentified
  misc_feature 1..23: note = Description of Unknown: Target sequence
  source 1..23: mol_type = unassigned RNA
atgtgtttaaagtcaaggatatg

SEQ ID NO: 1010 - RNA, 23 nt, unidentified
  misc_feature 1..23: note = Description of Unknown: Target sequence
  source 1..23: mol_type = unassigned RNA
gaaggatgtcaaagctctgtttg

SEQ ID NO: 1011 - RNA, 23 nt, unidentified
  misc_feature 1..23: note = Description of Unknown: Target sequence
  source 1..23: mol_type = unassigned RNA
catcatgtgtttaaagtcaagga

SEQ ID NO: 1012 - RNA, 23 nt, unidentified
  misc_feature 1..23: note = Description of Unknown: Target sequence
  source 1..23: mol_type = unassigned RNA
gcaagccaagatctcagtcactc

SEQ ID NO: 1013 - RNA, 23 nt, unidentified
  misc_feature 1..23: note = Description of Unknown: Target sequence
  source 1..23: mol_type = unassigned RNA
gctcaaagatgaggatttgggtt

SEQ ID NO: 1014 - RNA, 23 nt, unidentified
  misc_feature 1..23: note = Description of Unknown: Target sequence
  source 1..23: mol_type = unassigned RNA
agccaagatctcagtcactcgcc

SEQ ID NO: 1015 - RNA, 23 nt, unidentified
  misc_feature 1..23: note = Description of Unknown: Target sequence
  source 1..23: mol_type = unassigned RNA
tggtgctagatggatcagacagc

SEQ ID NO: 1016 - RNA, 23 nt, unidentified
  misc_feature 1..23: note = Description of Unknown: Target sequence
  source 1..23: mol_type = unassigned RNA
accaaatctctgagtctctgtgg

SEQ ID NO: 1017 - RNA, 23 nt, unidentified
  misc_feature 1..23: note = Description of Unknown: Target sequence
  source 1..23: mol_type = unassigned RNA
ggtgctagatggatcagacagca

SEQ ID NO: 1018 - RNA, 23 nt, unidentified
  misc_feature 1..23: note = Description of Unknown: Target sequence
  source 1..23: mol_type = unassigned RNA
aagaccacaagctgaagtcaggg

SEQ ID NO: 1019 - RNA, 23 nt, unidentified
  misc_feature 1..23: note = Description of Unknown: Target sequence
  source 1..23: mol_type = unassigned RNA
gtgtttaaagtcaaggatatgga

SEQ ID NO: 1020 - RNA, 23 nt, unidentified
  misc_feature 1..23: note = Description of Unknown: Target sequence
  source 1..23: mol_type = unassigned RNA
caagctcaaagatgaggatttgg

SEQ ID NO: 1021 - RNA, 23 nt, unidentified
  misc_feature 1..23: note = Description of Unknown: Target sequence
  source 1..23: mol_type = unassigned RNA
tggagggagtagagatcaaaggc

SEQ ID NO: 1022 - RNA, 23 nt, unidentified
  misc_feature 1..23: note = Description of Unknown: Target sequence
  source 1..23: mol_type = unassigned RNA
tttctaccaaatgattgatgaaa

SEQ ID NO: 1023 - RNA, 23 nt, unidentified
  misc_feature 1..23: note = Description of Unknown: Target sequence
  source 1..23: mol_type = unassigned RNA
agctcaaagatgaggatttgggt

SEQ ID NO: 1024 - RNA, 23 nt, unidentified
  misc_feature 1..23: note = Description of Unknown: Target sequence
  source 1..23: mol_type = unassigned RNA
tcctgccaagattccttcatgta

SEQ ID NO: 1025 - RNA, 23 nt, unidentified
  misc_feature 1..23: note = Description of Unknown: Target sequence
  source 1..23: mol_type = unassigned RNA
ccatggcaagccaagatctcagt

SEQ ID NO: 1026 - RNA, 23 nt, unidentified
  misc_feature 1..23: note = Description of Unknown: Target sequence
  source 1..23: mol_type = unassigned RNA
tacctggatgtgtatgtgtttgg

SEQ ID NO: 1027 - RNA, 23 nt, unidentified
  misc_feature 1..23: note = Description of Unknown: Target sequence
  source 1..23: mol_type = unassigned RNA
tgtgtttaaagtcaaggatatgg

SEQ ID NO: 1028 - RNA, 23 nt, unidentified
  misc_feature 1..23: note = Description of Unknown: Target sequence
  source 1..23: mol_type = unassigned RNA
aagccgcttcattcaagttggtg

SEQ ID NO: 1029 - RNA, 21 nt, synthetic construct
  misc_feature 1..21: note = Description of Artificial Sequence: Synthetic oligonucleotide
  source 1..21: mol_type = other RNA
aagggaatgtgaccaggtctt

SEQ ID NO: 1030 - RNA, 21 nt, synthetic construct
  misc_feature 1..21: note = Description of Artificial Sequence: Synthetic oligonucleotide
  source 1..21: mol_type = other RNA
ccaagcagacaagcaaagcat

SEQ ID NO: 1031 - RNA, 21 nt, synthetic construct
  misc_feature 1..21: note = Description of Artificial Sequence: Synthetic oligonucleotide
  source 1..21: mol_type = other RNA
gccaggacacaccatcctgct

SEQ ID NO: 1032 - RNA, 21 nt, synthetic construct
  misc_feature 1..21: note = Description of Artificial Sequence: Synthetic oligonucleotide
  source 1..21: mol_type = other RNA
ccagcttctctcctgccttct

SEQ ID NO: 1033 - RNA, 21 nt, synthetic construct
  misc_feature 1..21: note = Description of Artificial Sequence: Synthetic oligonucleotide
  source 1..21: mol_type = other RNA
tgcctgatgccctttatcttt

SEQ ID NO: 1034 - RNA, 21 nt, synthetic construct
  misc_feature 1..21: note = Description of Artificial Sequence: Synthetic oligonucleotide
  source 1..21: mol_type = other RNA
tgggcctcttgtctggaggtt

SEQ ID NO: 1035 - RNA, 21 nt, synthetic construct
  misc_feature 1..21: note = Description of Artificial Sequence: Synthetic oligonucleotide
  source 1..21: mol_type = other RNA
ccaccactccatggtctttgt

SEQ ID NO: 1036 - RNA, 21 nt, synthetic construct
  misc_feature 1..21: note = Description of Artificial Sequence: Synthetic oligonucleotide
  source 1..21: mol_type = other RNA
tccttccgacttctccaagat

SEQ ID NO: 1037 - RNA, 21 nt, synthetic construct
  misc_feature 1..21: note = Description of Artificial Sequence: Synthetic oligonucleotide
  source 1..21: mol_type = other RNA
aggcactggagtacgtgtgtt

SEQ ID NO: 1038 - RNA, 21 nt, synthetic construct
  misc_feature 1..21: note = Description of Artificial Sequence: Synthetic oligonucleotide
  source 1..21: mol_type = other RNA
tgtgtccttctggcttctact

SEQ ID NO: 1039 - RNA, 21 nt, synthetic construct
  misc_feature 1..21: note = Description of Artificial Sequence: Synthetic oligonucleotide
  source 1..21: mol_type = other RNA
tacccgtaccctgtgcagact

SEQ ID NO: 1040 - RNA, 21 nt, synthetic construct
  misc_feature 1..21: note = Description of Artificial Sequence: Synthetic oligonucleotide
  source 1..21: mol_type = other RNA
agacacgtacctgcagatctt

SEQ ID NO: 1041 - RNA, 21 nt, synthetic construct
  misc_feature 1..21: note = Description of Artificial Sequence: Synthetic oligonucleotide
  source 1..21: mol_type = other RNA
agactcaagaccaaaagactt

SEQ ID NO: 1042 - RNA, 21 nt, synthetic construct
  misc_feature 1..21: note = Description of Artificial Sequence: Synthetic oligonucleotide
  source 1..21: mol_type = other RNA
agtgcagagcaatccactgtt

SEQ ID NO: 1043 - RNA, 21 nt, synthetic construct
  misc_feature 1..21: note = Description of Artificial Sequence: Synthetic oligonucleotide
  source 1..21: mol_type = other RNA
accacacgacttcgagaacgt

SEQ ID NO: 1044 - RNA, 21 nt, synthetic construct
  misc_feature 1..21: note = Description of Artificial Sequence: Synthetic oligonucleotide
  source 1..21: mol_type = other RNA
cctactacaatgtgagtgatt

SEQ ID NO: 1045 - RNA, 21 nt, synthetic construct
  misc_feature 1..21: note = Description of Artificial Sequence: Synthetic oligonucleotide
  source 1..21: mol_type = other RNA
tgatgagatctctttccactt

SEQ ID NO: 1046 - RNA, 21 nt, synthetic construct
  misc_feature 1..21: note = Description of Artificial Sequence: Synthetic oligonucleotide
  source 1..21: mol_type = other RNA
cacctgccaagtgaatggcct

SEQ ID NO: 1047 - RNA, 21 nt, synthetic construct
  misc_feature 1..21: note = Description of Artificial Sequence: Synthetic oligonucleotide
  source 1..21: mol_type = other RNA
cattggcacaaggaaggtggt

SEQ ID NO: 1048 - RNA, 21 nt, synthetic construct
  misc_feature 1..21: note = Description of Artificial Sequence: Synthetic oligonucleotide
  source 1..21: mol_type = other RNA
cgccttgaagacagcgtcact

SEQ ID NO: 1049 - RNA, 21 nt, synthetic construct
  misc_feature 1..21: note = Description of Artificial Sequence: Synthetic oligonucleotide
  source 1..21: mol_type = other RNA
ggcgaacgtgtcaggaaggtt

SEQ ID NO: 1050 - RNA, 21 nt, synthetic construct
  misc_feature 1..21: note = Description of Artificial Sequence: Synthetic oligonucleotide
  source 1..21: mol_type = other RNA
ctgccaagactccttcatgtt

SEQ ID NO: 1051 - RNA, 21 nt, synthetic construct
  misc_feature 1..21: note = Description of Artificial Sequence: Synthetic oligonucleotide
  source 1..21: mol_type = other RNA
gccgaagctttcctgtcttct

SEQ ID NO: 1052 - RNA, 21 nt, synthetic construct
  misc_feature 1..21: note = Description of Artificial Sequence: Synthetic oligonucleotide
  source 1..21: mol_type = other RNA
ttccctgacagagaccatagt

SEQ ID NO: 1053 - RNA, 21 nt, synthetic construct
  misc_feature 1..21: note = Description of Artificial Sequence: Synthetic oligonucleotide
  source 1..21: mol_type = other RNA
ggagtcgatgctgaggatggt

SEQ ID NO: 1054 - RNA, 21 nt, synthetic construct
  misc_feature 1..21: note = Description of Artificial Sequence: Synthetic oligonucleotide
  source 1..21: mol_type = other RNA
caacagaagcggaagatcgtt

SEQ ID NO: 1055 - RNA, 21 nt, synthetic construct
  misc_feature 1..21: note = Description of Artificial Sequence: Synthetic oligonucleotide
  source 1..21: mol_type = other RNA
tagatggatcagacagcattt

SEQ ID NO: 1056 - RNA, 21 nt, synthetic construct
  misc_feature 1..21: note = Description of Artificial Sequence: Synthetic oligonucleotide
  source 1..21: mol_type = other RNA
gccagcaacttcacaggagct

SEQ ID NO: 1057 - RNA, 21 nt, synthetic construct
  misc_feature 1..21: note = Description of Artificial Sequence: Synthetic oligonucleotide
  source 1..21: mol_type = other RNA
attgagaaggtggcaagttat

SEQ ID NO: 1058 - RNA, 21 nt, synthetic construct
  misc_feature 1..21: note = Description of Artificial Sequence: Synthetic oligonucleotide
  source 1..21: mol_type = other RNA
atttgggtcaaagtgtctgat

SEQ ID NO: 1059 - RNA, 21 nt, synthetic construct
  misc_feature 1..21: note = Description of Artificial Sequence: Synthetic oligonucleotide
  source 1..21: mol_type = other RNA
agacagcagtaatgcagactt

SEQ ID NO: 1060 - RNA, 21 nt, synthetic construct
  misc_feature 1..21: note = Description of Artificial Sequence: Synthetic oligonucleotide
  source 1..21: mol_type = other RNA
gaagaccacaagttgaagtct

SEQ ID NO: 1061 - RNA, 21 nt, synthetic construct
  misc_feature 1..21: note = Description of Artificial Sequence: Synthetic oligonucleotide
  source 1..21: mol_type = other RNA
gggactaacaccaagaaggct

SEQ ID NO: 1062 - RNA, 21 nt, synthetic construct
  misc_feature 1..21: note = Description of Artificial Sequence: Synthetic oligonucleotide
  source 1..21: mol_type = other RNA
caggcagtgtacagcatgatt

SEQ ID NO: 1063 - RNA, 21 nt, synthetic construct
  misc_feature 1..21: note = Description of Artificial Sequence: Synthetic oligonucleotide
  source 1..21: mol_type = other RNA
ggccagatgacgtccctcctt

SEQ ID NO: 1064 - RNA, 21 nt, synthetic construct
  misc_feature 1..21: note = Description of Artificial Sequence: Synthetic oligonucleotide
  source 1..21: mol_type = other RNA
tgtcatcatcctcatgactgt

SEQ ID NO: 1065 - RNA, 21 nt, synthetic construct
  misc_feature 1..21: note = Description of Artificial Sequence: Synthetic oligonucleotide
  source 1..21: mol_type = other RNA
actgatggattgcacaacatt

SEQ ID NO: 1066 - RNA, 21 nt, synthetic construct
  misc_feature 1..21: note = Description of Artificial Sequence: Synthetic oligonucleotide
  source 1..21: mol_type = other RNA
ttactgtcattgatgagatct

SEQ ID NO: 1067 - RNA, 21 nt, synthetic construct
  misc_feature 1..21: note = Description of Artificial Sequence: Synthetic oligonucleotide
  source 1..21: mol_type = other RNA
gacttgctatacattggcaat

SEQ ID NO: 1068 - RNA, 21 nt, synthetic construct
  misc_feature 1..21: note = Description of Artificial Sequence: Synthetic oligonucleotide
  source 1..21: mol_type = other RNA
gggcctttggtgaaccaagtt

SEQ ID NO: 1069 - RNA, 21 nt, synthetic construct
  misc_feature 1..21: note = Description of Artificial Sequence: Synthetic oligonucleotide
  source 1..21: mol_type = other RNA
agcaacatgtgttcaaagtct

SEQ ID NO: 1070 - RNA, 21 nt, synthetic construct
  misc_feature 1..21: note = Description of Artificial Sequence: Synthetic oligonucleotide
  source 1..21: mol_type = other RNA
gtcaaggatatggaaaacctt

SEQ ID NO: 1071 - RNA, 21 nt, synthetic construct
  misc_feature 1..21: note = Description of Artificial Sequence: Synthetic oligonucleotide
  source 1..21: mol_type = other RNA
gaagatgttttctaccaaatt

SEQ ID NO: 1072 - RNA, 21 nt, synthetic construct
  misc_feature 1..21: note = Description of Artificial Sequence: Synthetic oligonucleotide
  source 1..21: mol_type = other RNA
atcgatgaaagccagtctctt

SEQ ID NO: 1073 - RNA, 21 nt, synthetic construct
  misc_feature 1..21: note = Description of Artificial Sequence: Synthetic oligonucleotide
  source 1..21: mol_type = other RNA
tctctgagtctctgtggcatt

SEQ ID NO: 1074 - RNA, 21 nt, synthetic construct
  misc_feature 1..21: note = Description of Artificial Sequence: Synthetic oligonucleotide
  source 1..21: mol_type = other RNA
tgggaacacaggaagggtact

SEQ ID NO: 1075 - RNA, 21 nt, synthetic construct
  misc_feature 1..21: note = Description of Artificial Sequence: Synthetic oligonucleotide
  source 1..21: mol_type = other RNA
cgattaccacaagcaaccatt

SEQ ID NO: 1076 - RNA, 21 nt, synthetic construct
  misc_feature 1..21: note = Description of Artificial Sequence: Synthetic oligonucleotide
  source 1..21: mol_type = other RNA
tcagtcattcgcccttcaaat

SEQ ID NO: 1077 - RNA, 21 nt, synthetic construct
  misc_feature 1..21: note = Description of Artificial Sequence: Synthetic oligonucleotide
  source 1..21: mol_type = other RNA
gggacacgagagctgtatggt

SEQ ID NO: 1078 - RNA, 21 nt, synthetic construct
  misc_feature 1..21: note = Description of Artificial Sequence: Synthetic oligonucleotide
  source 1..21: mol_type = other RNA
cagcagcacattgtttcactt

SEQ ID NO: 1079 - RNA, 21 nt, synthetic construct
  misc_feature 1..21: note = Description of Artificial Sequence: Synthetic oligonucleotide
  source 1..21: mol_type = other RNA
aaggaacactcaatcaaggtt

SEQ ID NO: 1080 - RNA, 21 nt, synthetic construct
  misc_feature 1..21: note = Description of Artificial Sequence: Synthetic oligonucleotide
  source 1..21: mol_type = other RNA
tagaagtagtcctatttcact

SEQ ID NO: 1081 - RNA, 21 nt, synthetic construct
  misc_feature 1..21: note = Description of Artificial Sequence: Synthetic oligonucleotide
  source 1..21: mol_type = other RNA
caactacaacattaatgggat

SEQ ID NO: 1082 - RNA, 21 nt, synthetic construct
  misc_feature 1..21: note = Description of Artificial Sequence: Synthetic oligonucleotide
  source 1..21: mol_type = other RNA
tatgacgttgccctgatcaat

SEQ ID NO: 1083 - RNA, 21 nt, synthetic construct
  misc_feature 1..21: note = Description of Artificial Sequence: Synthetic oligonucleotide
  source 1..21: mol_type = other RNA
gctcaagaataagctgaaatt

SEQ ID NO: 1084 - RNA, 21 nt, synthetic construct
  misc_feature 1..21: note = Description of Artificial Sequence: Synthetic oligonucleotide
  source 1..21: mol_type = other RNA
ttcctccaactaccacttgct

SEQ ID NO: 1085 - RNA, 21 nt, synthetic construct
  misc_feature 1..21: note = Description of Artificial Sequence: Synthetic oligonucleotide
  source 1..21: mol_type = other RNA
cttgccagcaacaaaaggaat

SEQ ID NO: 1086 - RNA, 21 nt, synthetic construct
  misc_feature 1..21: note = Description of Artificial Sequence: Synthetic oligonucleotide
  source 1..21: mol_type = other RNA
caggatatcaaagctctgttt

SEQ ID NO: 1087 - RNA, 21 nt, synthetic construct
  misc_feature 1..21: note = Description of Artificial Sequence: Synthetic oligonucleotide
  source 1..21: mol_type = other RNA
ttgtgtctgaggaggagaaat

SEQ ID NO: 1088 - RNA, 21 nt, synthetic construct
  misc_feature 1..21: note = Description of Artificial Sequence: Synthetic oligonucleotide
  source 1..21: mol_type = other RNA
ggaggtctacatcaagaatgt

SEQ ID NO: 1089 - RNA, 21 nt, synthetic construct
  misc_feature 1..21: note = Description of Artificial Sequence: Synthetic oligonucleotide
  source 1..21: mol_type = other RNA
tcggttcctttgtactggagt

SEQ ID NO: 1090 - RNA, 21 nt, synthetic construct
  misc_feature 1..21: note = Description of Artificial Sequence: Synthetic oligonucleotide
  source 1..21: mol_type = other RNA
gagtgagtccctatgctgact

SEQ ID NO: 1091 - RNA, 21 nt, synthetic construct
  misc_feature 1..21: note = Description of Artificial Sequence: Synthetic oligonucleotide
  source 1..21: mol_type = other RNA
tacttgcagaggtgattctgt

SEQ ID NO: 1092 - RNA, 21 nt, synthetic construct
  misc_feature 1..21: note = Description of Artificial Sequence: Synthetic oligonucleotide
  source 1..21: mol_type = other RNA
tcattcaagttggtgtaatct

SEQ ID NO: 1093 - RNA, 21 nt, synthetic construct
  misc_feature 1..21: note = Description of Artificial Sequence: Synthetic oligonucleotide
  source 1..21: mol_type = other RNA
gagtagtggatgtctgcaaat

SEQ ID NO: 1094 - RNA, 21 nt, synthetic construct
  misc_feature 1..21: note = Description of Artificial Sequence: Synthetic oligonucleotide
  source 1..21: mol_type = other RNA
aaccagaagcggcaaaagcat

SEQ ID NO: 1095 - RNA, 21 nt, synthetic construct
  misc_feature 1..21: note = Description of Artificial Sequence: Synthetic oligonucleotide
  source 1..21: mol_type = other RNA
gactttcacatcaacctcttt

SEQ ID NO: 1096 - RNA, 21 nt, synthetic construct
  misc_feature 1..21: note = Description of Artificial Sequence: Synthetic oligonucleotide
  source 1..21: mol_type = other RNA
ctctttcaagtgctgccctgt

SEQ ID NO: 1097 - RNA, 21 nt, synthetic construct
  misc_feature 1..21: note = Description of Artificial Sequence: Synthetic oligonucleotide
  source 1..21: mol_type = other RNA
aaggagaaactccaagatgat

SEQ ID NO: 1098 - RNA, 21 nt, synthetic construct
  misc_feature 1..21: note = Description of Artificial Sequence: Synthetic oligonucleotide
  source 1..21: mol_type = other RNA
gaggatttgggttttctatat

SEQ ID NO: 1099 - RNA, 21 nt, synthetic construct
  misc_feature 1..21: note = Description of Artificial Sequence: Synthetic oligonucleotide
  source 1..21: mol_type = other RNA
gcaagccaggacacaccatct

SEQ ID NO: 1100 - RNA, 21 nt, synthetic construct
  misc_feature 1..21: note = Description of Artificial Sequence: Synthetic oligonucleotide
  source 1..21: mol_type = other RNA
cttctctcctgccttccaact

SEQ ID NO: 1101 - RNA, 21 nt, synthetic construct
  misc_feature 1..21: note = Description of Artificial Sequence: Synthetic oligonucleotide
  source 1..21: mol_type = other RNA
cttgggcctcttgtctggagt

SEQ ID NO: 1102 - RNA, 21 nt, synthetic construct
  misc_feature 1..21: note = Description of Artificial Sequence: Synthetic oligonucleotide
  source 1..21: mol_type = other RNA
agagatcaaaggcggctcctt

SEQ ID NO: 1103 - RNA, 21 nt, synthetic construct
  misc_feature 1..21: note = Description of Artificial Sequence: Synthetic oligonucleotide
  source 1..21: mol_type = other RNA
actggagtacgtgtgtccttt

SEQ ID NO: 1104 - RNA, 21 nt, synthetic construct
  misc_feature 1..21: note = Description of Artificial Sequence: Synthetic oligonucleotide
  source 1..21: mol_type = other RNA
cctgaagactcaagaccaaat

SEQ ID NO: 1105 - RNA, 21 nt, synthetic construct
  misc_feature 1..21: note = Description of Artificial Sequence: Synthetic oligonucleotide
  source 1..21: mol_type = other RNA
gactgtcaggaaggcagagtt

SEQ ID NO: 1106 - RNA, 21 nt, synthetic construct
  misc_feature 1..21: note = Description of Artificial Sequence: Synthetic oligonucleotide
  source 1..21: mol_type = other RNA
tggcacaaggaaggtgggcat

SEQ ID NO: 1107 - RNA, 21 nt, synthetic construct
  misc_feature 1..21: note = Description of Artificial Sequence: Synthetic oligonucleotide
  source 1..21: mol_type = other RNA
ccgccttgaagacagcgtcat

SEQ ID NO: 1108 - RNA, 21 nt, synthetic construct
  misc_feature 1..21: note = Description of Artificial Sequence: Synthetic oligonucleotide
  source 1..21: mol_type = other RNA
ctgaagcagacagcagtaatt

SEQ ID NO: 1109 - RNA, 21 nt, synthetic construct
  misc_feature 1..21: note = Description of Artificial Sequence: Synthetic oligonucleotide
  source 1..21: mol_type = other RNA
tgcagactgggtcacgaagct

SEQ ID NO: 1110 - RNA, 21 nt, synthetic construct
  misc_feature 1..21: note = Description of Artificial Sequence: Synthetic oligonucleotide
  source 1..21: mol_type = other RNA
taacaccaagaaggccctcct

SEQ ID NO: 1111 - RNA, 21 nt, synthetic construct
  misc_feature 1..21: note = Description of Artificial Sequence: Synthetic oligonucleotide
  source 1..21: mol_type = other RNA
atgagctggccagatgacgtt

SEQ ID NO: 1112 - RNA, 21 nt, synthetic construct
  misc_feature 1..21: note = Description of Artificial Sequence: Synthetic oligonucleotide
  source 1..21: mol_type = other RNA
acttgctatacattggcaagt

SEQ ID NO: 1113 - RNA, 21 nt, synthetic construct
  misc_feature 1..21: note = Description of Artificial Sequence: Synthetic oligonucleotide
  source 1..21: mol_type = other RNA
tctaccaaatgatcgatgaat

SEQ ID NO: 1114 - RNA, 21 nt, synthetic construct
  misc_feature 1..21: note = Description of Artificial Sequence: Synthetic oligonucleotide
  source 1..21: mol_type = other RNA
ggtttgggaacacaggaaggt

SEQ ID NO: 1115 - RNA, 21 nt, synthetic construct
  misc_feature 1..21: note = Description of Artificial Sequence: Synthetic oligonucleotide
  source 1..21: mol_type = other RNA
catggcaggccaagatctcat

SEQ ID NO: 1116 - RNA, 21 nt, synthetic construct
  misc_feature 1..21: note = Description of Artificial Sequence: Synthetic oligonucleotide
  source 1..21: mol_type = other RNA
agggacacgagagctgtatgt

SEQ ID NO: 1117 - RNA, 21 nt, synthetic construct
  misc_feature 1..21: note = Description of Artificial Sequence: Synthetic oligonucleotide
  source 1..21: mol_type = other RNA
acaaggaacactcaatcaagt

SEQ ID NO: 1118 - RNA, 21 nt, synthetic construct
  misc_feature 1..21: note = Description of Artificial Sequence: Synthetic oligonucleotide
  source 1..21: mol_type = other RNA
aagcgggacctggagatagat

SEQ ID NO: 1119 - RNA, 21 nt, synthetic construct
  misc_feature 1..21: note = Description of Artificial Sequence: Synthetic oligonucleotide
  source 1..21: mol_type = other RNA
aaagctctgtttgtgtctgat

SEQ ID NO: 1120 - RNA, 21 nt, synthetic construct
  misc_feature 1..21: note = Description of Artificial Sequence: Synthetic oligonucleotide
  source 1..21: mol_type = other RNA
tggctgaaggagaaactccat

SEQ ID NO: 1121 - RNA, 23 nt, synthetic construct
  misc_feature 1..23: note = Description of Artificial Sequence: Synthetic oligonucleotide
  source 1..23: mol_type = other RNA
aagacctggtcacattcccttcc

SEQ ID NO: 1122 - RNA, 23 nt, synthetic construct
  misc_feature 1..23: note = Description of Artificial Sequence: Synthetic oligonucleotide
  source 1..23: mol_type = other RNA
atgctttgcttgtctgcttggct

SEQ ID NO: 1123 - RNA, 23 nt, synthetic construct
  misc_feature 1..23: note = Description of Artificial Sequence: Synthetic oligonucleotide
  source 1..23: mol_type = other RNA
agcaggatggtgtgtcctggctt

SEQ ID NO: 1124 - RNA, 23 nt, synthetic construct
  misc_feature 1..23: note = Description of Artificial Sequence: Synthetic oligonucleotide
  source 1..23: mol_type = other RNA
agaaggcaggagagaagctgggc

SEQ ID NO: 1125 - RNA, 23 nt, synthetic construct
  misc_feature 1..23: note = Description of Artificial Sequence: Synthetic oligonucleotide
  source 1..23: mol_type = other RNA
aaagataaagggcatcaggcaga

SEQ ID NO: 1126 - RNA, 23 nt, synthetic construct
  misc_feature 1..23: note = Description of Artificial Sequence: Synthetic oligonucleotide
  source 1..23: mol_type = other RNA
aacctccagacaagaggcccaag

SEQ ID NO: 1127 - RNA, 23 nt, synthetic construct
  misc_feature 1..23: note = Description of Artificial Sequence: Synthetic oligonucleotide
  source 1..23: mol_type = other RNA
acaaagaccatggagtggtggtc

SEQ ID NO: 1128 - RNA, 23 nt, synthetic construct
  misc_feature 1..23: note = Description of Artificial Sequence: Synthetic oligonucleotide
  source 1..23: mol_type = other RNA
atcttggagaagtcggaaggagc

SEQ ID NO: 1129 - RNA, 23 nt, synthetic construct
  misc_feature 1..23: note = Description of Artificial Sequence: Synthetic oligonucleotide
  source 1..23: mol_type = other RNA
aacacacgtactccagtgcctgg

SEQ ID NO: 1130 - RNA, 23 nt, synthetic construct
  misc_feature 1..23: note = Description of Artificial Sequence: Synthetic oligonucleotide
  source 1..23: mol_type = other RNA
agtagaagccagaaggacacacg

SEQ ID NO: 1131 - RNA, 23 nt, synthetic construct
  misc_feature 1..23: note = Description of Artificial Sequence: Synthetic oligonucleotide
  source 1..23: mol_type = other RNA
agtctgcacagggtacgggtaga

SEQ ID NO: 1132 - RNA, 23 nt, synthetic construct
  misc_feature 1..23: note = Description of Artificial Sequence: Synthetic oligonucleotide
  source 1..23: mol_type = other RNA
aagatctgcaggtacgtgtctgc

SEQ ID NO: 1133 - RNA, 23 nt, synthetic construct
  misc_feature 1..23: note = Description of Artificial Sequence: Synthetic oligonucleotide
  source 1..23: mol_type = other RNA
aagtcttttggtcttgagtcttc

SEQ ID NO: 1134 - RNA, 23 nt, synthetic construct
  misc_feature 1..23: note = Description of Artificial Sequence: Synthetic oligonucleotide
  source 1..23: mol_type = other RNA
aacagtggattgctctgcactct

SEQ ID NO: 1135 - RNA, 23 nt, synthetic construct
  misc_feature 1..23: note = Description of Artificial Sequence: Synthetic oligonucleotide
  source 1..23: mol_type = other RNA
acgttctcgaagtcgtgtggtct

SEQ ID NO: 1136 - RNA, 23 nt, synthetic construct
  misc_feature 1..23: note = Description of Artificial Sequence: Synthetic oligonucleotide
  source 1..23: mol_type = other RNA
aatcactcacattgtagtaggga

SEQ ID NO: 1137 - RNA, 23 nt, synthetic construct
  misc_feature 1..23: note = Description of Artificial Sequence: Synthetic oligonucleotide
  source 1..23: mol_type = other RNA
aagtggaaagagatctcatcact

SEQ ID NO: 1138 - RNA, 23 nt, synthetic construct
  misc_feature 1..23: note = Description of Artificial Sequence: Synthetic oligonucleotide
  source 1..23: mol_type = other RNA
aggccattcacttggcaggtgcg

SEQ ID NO: 1139 - RNA, 23 nt, synthetic construct
  misc_feature 1..23: note = Description of Artificial Sequence: Synthetic oligonucleotide
  source 1..23: mol_type = other RNA
actccgttgtcacagatcgctgt

SEQ ID NO: 1140 - RNA, 23 nt, synthetic construct
  misc_feature 1..23: note = Description of Artificial Sequence: Synthetic oligonucleotide
  source 1..23: mol_type = other RNA
accaccttccttgtgccaatggg

SEQ ID NO: 1141 - RNA, 23 nt, synthetic construct
  misc_feature 1..23: note = Description of Artificial Sequence: Synthetic oligonucleotide
  source 1..23: mol_type = other RNA
agtgacgctgtcttcaaggcggt

SEQ ID NO: 1142 - RNA, 23 nt, synthetic construct
  misc_feature 1..23: note = Description of Artificial Sequence: Synthetic oligonucleotide
  source 1..23: mol_type = other RNA
aaccttcctgacacgttcgccgc

SEQ ID NO: 1143 - RNA, 23 nt, synthetic construct
  misc_feature 1..23: note = Description of Artificial Sequence: Synthetic oligonucleotide
  source 1..23: mol_type = other RNA
aacatgaaggagtcttggcagga

SEQ ID NO: 1144 - RNA, 23 nt, synthetic construct
  misc_feature 1..23: note = Description of Artificial Sequence: Synthetic oligonucleotide
  source 1..23: mol_type = other RNA
agaagacaggaaagcttcggcca

SEQ ID NO: 1145 - RNA, 23 nt, synthetic construct
  misc_feature 1..23: note = Description of Artificial Sequence: Synthetic oligonucleotide
  source 1..23: mol_type = other RNA
actatggtctctgtcagggaaga

SEQ ID NO: 1146 - RNA, 23 nt, synthetic construct
  misc_feature 1..23: note = Description of Artificial Sequence: Synthetic oligonucleotide
  source 1..23: mol_type = other RNA
accatcctcagcatcgactcctt

SEQ ID NO: 1147 - RNA, 23 nt, synthetic construct
  misc_feature 1..23: note = Description of Artificial Sequence: Synthetic oligonucleotide
  source 1..23: mol_type = other RNA
aacgatcttccgcttctgttgtt

SEQ ID NO: 1148 - RNA, 23 nt, synthetic construct
  misc_feature 1..23: note = Description of Artificial Sequence: Synthetic oligonucleotide
  source 1..23: mol_type = other RNA
aaatgctgtctgatccatctagc

SEQ ID NO: 1149 - RNA, 23 nt, synthetic construct
  misc_feature 1..23: note = Description of Artificial Sequence: Synthetic oligonucleotide
  source 1..23: mol_type = other RNA
agctcctgtgaagttgctggccc

SEQ ID NO: 1150 - RNA, 23 nt, synthetic construct
  misc_feature 1..23: note = Description of Artificial Sequence: Synthetic oligonucleotide
  source 1..23: mol_type = other RNA
ataacttgccaccttctcaatta

SEQ ID NO: 1151 - RNA, 23 nt, synthetic construct
  misc_feature 1..23: note = Description of Artificial Sequence: Synthetic oligonucleotide
  source 1..23: mol_type = other RNA
atcagacactttgacccaaattt

SEQ ID NO: 1152 - RNA, 23 nt, synthetic construct
  misc_feature 1..23: note = Description of Artificial Sequence: Synthetic oligonucleotide
  source 1..23: mol_type = other RNA
aagtctgcattactgctgtctgc

SEQ ID NO: 1153 - RNA, 23 nt, synthetic construct
  misc_feature 1..23: note = Description of Artificial Sequence: Synthetic oligonucleotide
  source 1..23: mol_type = other RNA
agacttcaacttgtggtcttcat

SEQ ID NO: 1154 - RNA, 23 nt, synthetic construct
  misc_feature 1..23: note = Description of Artificial Sequence: Synthetic oligonucleotide
  source 1..23: mol_type = other RNA
agccttcttggtgttagtccctg

SEQ ID NO: 1155 - RNA, 23 nt, synthetic construct
  misc_feature 1..23: note = Description of Artificial Sequence: Synthetic oligonucleotide
  source 1..23: mol_type = other RNA
aatcatgctgtacactgcctgga

SEQ ID NO: 1156 - RNA, 23 nt, synthetic construct
  misc_feature 1..23: note = Description of Artificial Sequence: Synthetic oligonucleotide
  source 1..23: mol_type = other RNA
aaggagggacgtcatctggccag

SEQ ID NO: 1157 - RNA, 23 nt, synthetic construct
  misc_feature 1..23: note = Description of Artificial Sequence: Synthetic oligonucleotide
  source 1..23: mol_type = other RNA
acagtcatgaggatgatgacatg

SEQ ID NO: 1158 - RNA, 23 nt, synthetic construct
  misc_feature 1..23: note = Description of Artificial Sequence: Synthetic oligonucleotide
  source 1..23: mol_type = other RNA
aatgttgtgcaatccatcagtca

SEQ ID NO: 1159 - RNA, 23 nt, synthetic construct
  misc_feature 1..23: note = Description of Artificial Sequence: Synthetic oligonucleotide
  source 1..23: mol_type = other RNA
agatctcatcaatgacagtaatt

SEQ ID NO: 1160 - RNA, 23 nt, synthetic construct
  misc_feature 1..23: note = Description of Artificial Sequence: Synthetic oligonucleotide
  source 1..23: mol_type = other RNA
attgccaatgtatagcaagtccc

SEQ ID NO: 1161 - RNA, 23 nt, synthetic construct
  misc_feature 1..23: note = Description of Artificial Sequence: Synthetic oligonucleotide
  source 1..23: mol_type = other RNA
aacttggttcaccaaaggcccga

SEQ ID NO: 1162 - RNA, 23 nt, synthetic construct
  misc_feature 1..23: note = Description of Artificial Sequence: Synthetic oligonucleotide
  source 1..23: mol_type = other RNA
agctcattgtctttcttggaagc

SEQ ID NO: 1163 - RNA, 23 nt, synthetic construct
  misc_feature 1..23: note = Description of Artificial Sequence: Synthetic oligonucleotide
  source 1..23: mol_type = other RNA
agactttgaacacatgttgctca

SEQ ID NO: 1164 - RNA, 23 nt, synthetic construct
  misc_feature 1..23: note = Description of Artificial Sequence: Synthetic oligonucleotide
  source 1..23: mol_type = other RNA
aaggttttccatatccttgactt

SEQ ID NO: 1165 - RNA, 23 nt, synthetic construct
  misc_feature 1..23: note = Description of Artificial Sequence: Synthetic oligonucleotide
  source 1..23: mol_type = other RNA
aatttggtagaaaacatcttcca

SEQ ID NO: 1166 - RNA, 23 nt, synthetic construct
  misc_feature 1..23: note = Description of Artificial Sequence: Synthetic oligonucleotide
  source 1..23: mol_type = other RNA
aagagactggctttcatcgatca

SEQ ID NO: 1167 - RNA, 23 nt, synthetic construct
  misc_feature 1..23: note = Description of Artificial Sequence: Synthetic oligonucleotide
  source 1..23: mol_type = other RNA
aatgccacagagactcagagact

SEQ ID NO: 1168 - RNA, 23 nt, synthetic construct
  misc_feature 1..23: note = Description of Artificial Sequence: Synthetic oligonucleotide
  source 1..23: mol_type = other RNA
agtacccttcctgtgttcccaaa

SEQ ID NO: 1169 - RNA, 23 nt, synthetic construct
  misc_feature 1..23: note = Description of Artificial Sequence: Synthetic oligonucleotide
  source 1..23: mol_type = other RNA
aatggttgcttgtggtaatcggt

SEQ ID NO: 1170 - RNA, 23 nt, synthetic construct
  misc_feature 1..23: note = Description of Artificial Sequence: Synthetic oligonucleotide
  source 1..23: mol_type = other RNA
atttgaagggcgaatgactgaga

SEQ ID NO: 1171 - RNA, 23 nt, synthetic construct
  misc_feature 1..23: note = Description of Artificial Sequence: Synthetic oligonucleotide
  source 1..23: mol_type = other RNA
accatacagctctcgtgtccctt

SEQ ID NO: 1172 - RNA, 23 nt, synthetic construct
  misc_feature 1..23: note = Description of Artificial Sequence: Synthetic oligonucleotide
  source 1..23: mol_type = other RNA
aagtgaaacaatgtgctgctgtc

SEQ ID NO: 1173 - RNA, 23 nt, synthetic construct
  misc_feature 1..23: note = Description of Artificial Sequence: Synthetic oligonucleotide
  source 1..23: mol_type = other RNA
aaccttgattgagtgttccttgt

SEQ ID NO: 1174 - RNA, 23 nt, synthetic construct
  misc_feature 1..23: note = Description of Artificial Sequence: Synthetic oligonucleotide
  source 1..23: mol_type = other RNA
agtgaaataggactacttctatc

SEQ ID NO: 1175 - RNA, 23 nt, synthetic construct
  misc_feature 1..23: note = Description of Artificial Sequence: Synthetic oligonucleotide
  source 1..23: mol_type = other RNA
atcccattaatgttgtagttggg

SEQ ID NO: 1176 - RNA, 23 nt, synthetic construct
  misc_feature 1..23: note = Description of Artificial Sequence: Synthetic oligonucleotide
  source 1..23: mol_type = other RNA
attgatcagggcaacgtcatagt

SEQ ID NO: 1177 - RNA, 23 nt, synthetic construct
  misc_feature 1..23: note = Description of Artificial Sequence: Synthetic oligonucleotide
  source 1..23: mol_type = other RNA
aatttcagcttattcttgagctt

SEQ ID NO: 1178 - RNA, 23 nt, synthetic construct
  misc_feature 1..23: note = Description of Artificial Sequence: Synthetic oligonucleotide
  source 1..23: mol_type = other RNA
agcaagtggtagttggaggaagc

SEQ ID NO: 1179 - RNA, 23 nt, synthetic construct
  misc_feature 1..23: note = Description of Artificial Sequence: Synthetic oligonucleotide
  source 1..23: mol_type = other RNA
attccttttgttgctggcaagtg

SEQ ID NO: 1180 - RNA, 23 nt, synthetic construct
  misc_feature 1..23: note = Description of Artificial Sequence: Synthetic oligonucleotide
  source 1..23: mol_type = other RNA
aaacagagctttgatatcctgtg

SEQ ID NO: 1181 - RNA, 23 nt, synthetic construct
  misc_feature 1..23: note = Description of Artificial Sequence: Synthetic oligonucleotide
  source 1..23: mol_type = other RNA
atttctcctcctcagacacaaac

SEQ ID NO: 1182 - RNA, 23 nt, synthetic construct
  misc_feature 1..23: note = Description of Artificial Sequence: Synthetic oligonucleotide
  source 1..23: mol_type = other RNA
acattcttgatgtagacctcctt

SEQ ID NO: 1183 - RNA, 23 nt, synthetic construct
  misc_feature 1..23: note = Description of Artificial Sequence: Synthetic oligonucleotide
  source 1..23: mol_type = other RNA
actccagtacaaaggaaccgagg

SEQ ID NO: 1184 - RNA, 23 nt, synthetic construct
  misc_feature 1..23: note = Description of Artificial Sequence: Synthetic oligonucleotide
  source 1..23: mol_type = other RNA
agtcagcatagggactcactcct

SEQ ID NO: 1185 - RNA, 23 nt, synthetic construct
  misc_feature 1..23: note = Description of Artificial Sequence: Synthetic oligonucleotide
  source 1..23: mol_type = other RNA
acagaatcacctctgcaagtatt

SEQ ID NO: 1186 - RNA, 23 nt, synthetic construct
  misc_feature 1..23: note = Description of Artificial Sequence: Synthetic oligonucleotide
  source 1..23: mol_type = other RNA
agattacaccaacttgaatgaaa

SEQ ID NO: 1187 - RNA, 23 nt, synthetic construct
  misc_feature 1..23: note = Description of Artificial Sequence: Synthetic oligonucleotide
  source 1..23: mol_type = other RNA
atttgcagacatccactactccc

SEQ ID NO: 1188 - RNA, 23 nt, synthetic construct
  misc_feature 1..23: note = Description of Artificial Sequence: Synthetic oligonucleotide
  source 1..23: mol_type = other RNA
atgcttttgccgcttctggtttt

SEQ ID NO: 1189 - RNA, 23 nt, synthetic construct
  misc_feature 1..23: note = Description of Artificial Sequence: Synthetic oligonucleotide
  source 1..23: mol_type = other RNA
aaagaggttgatgtgaaagtctc

SEQ ID NO: 1190 - RNA, 23 nt, synthetic construct
  misc_feature 1..23: note = Description of Artificial Sequence: Synthetic oligonucleotide
  source 1..23: mol_type = other RNA
acagggcagcacttgaaagaggt

SEQ ID NO: 1191 - RNA, 23 nt, synthetic construct
  misc_feature 1..23: note = Description of Artificial Sequence: Synthetic oligonucleotide
  source 1..23: mol_type = other RNA
atcatcttggagtttctccttca

SEQ ID NO: 1192 - RNA, 23 nt, synthetic construct
  misc_feature 1..23: note = Description of Artificial Sequence: Synthetic oligonucleotide
  source 1..23: mol_type = other RNA
atatagaaaacccaaatcctcat

SEQ ID NO: 1193 - RNA, 23 nt, synthetic construct
  misc_feature 1..23: note = Description of Artificial Sequence: Synthetic oligonucleotide
  source 1..23: mol_type = other RNA
agatggtgtgtcctggcttgctt

SEQ ID NO: 1194 - RNA, 23 nt, synthetic construct
  misc_feature 1..23: note = Description of Artificial Sequence: Synthetic oligonucleotide
  source 1..23: mol_type = other RNA
agttggaaggcaggagagaagct

SEQ ID NO: 1195 - RNA, 23 nt, synthetic construct
  misc_feature 1..23: note = Description of Artificial Sequence: Synthetic oligonucleotide
  source 1..23: mol_type = other RNA
actccagacaagaggcccaagat

SEQ ID NO: 1196 - RNA, 23 nt, synthetic construct
  misc_feature 1..23: note = Description of Artificial Sequence: Synthetic oligonucleotide
  source 1..23: mol_type = other RNA
aaggagccgcctttgatctctac

SEQ ID NO: 1197 - RNA, 23 nt, synthetic construct
  misc_feature 1..23: note = Description of Artificial Sequence: Synthetic oligonucleotide
  source 1..23: mol_type = other RNA
aaaggacacacgtactccagtgc

SEQ ID NO: 1198 - RNA, 23 nt, synthetic construct
  misc_feature 1..23: note = Description of Artificial Sequence: Synthetic oligonucleotide
  source 1..23: mol_type = other RNA
atttggtcttgagtcttcagggt

SEQ ID NO: 1199 - RNA, 23 nt, synthetic construct
  misc_feature 1..23: note = Description of Artificial Sequence: Synthetic oligonucleotide
  source 1..23: mol_type = other RNA
aactctgccttcctgacagtctt

SEQ ID NO: 1200 - RNA, 23 nt, synthetic construct
  misc_feature 1..23: note = Description of Artificial Sequence: Synthetic oligonucleotide
  source 1..23: mol_type = other RNA
atgcccaccttccttgtgccaat

SEQ ID NO: 1201 - RNA, 23 nt, synthetic construct
  misc_feature 1..23: note = Description of Artificial Sequence: Synthetic oligonucleotide
  source 1..23: mol_type = other RNA
atgacgctgtcttcaaggcggta

SEQ ID NO: 1202 - RNA, 23 nt, synthetic construct
  misc_feature 1..23: note = Description of Artificial Sequence: Synthetic oligonucleotide
  source 1..23: mol_type = other RNA
aattactgctgtctgcttcagac

SEQ ID NO: 1203 - RNA, 23 nt, synthetic construct
  misc_feature 1..23: note = Description of Artificial Sequence: Synthetic oligonucleotide
  source 1..23: mol_type = other RNA
agcttcgtgacccagtctgcatt

SEQ ID NO: 1204 - RNA, 23 nt, synthetic construct
  misc_feature 1..23: note = Description of Artificial Sequence: Synthetic oligonucleotide
  source 1..23: mol_type = other RNA
aggagggccttcttggtgttagt

SEQ ID NO: 1205 - RNA, 23 nt, synthetic construct
  misc_feature 1..23: note = Description of Artificial Sequence: Synthetic oligonucleotide
  source 1..23: mol_type = other RNA
aacgtcatctggccagctcatca

SEQ ID NO: 1206 - RNA, 23 nt, synthetic construct
  misc_feature 1..23: note = Description of Artificial Sequence: Synthetic oligonucleotide
  source 1..23: mol_type = other RNA
acttgccaatgtatagcaagtcc

SEQ ID NO: 1207 - RNA, 23 nt, synthetic construct
  misc_feature 1..23: note = Description of Artificial Sequence: Synthetic oligonucleotide
  source 1..23: mol_type = other RNA
attcatcgatcatttggtagaaa

SEQ ID NO: 1208 - RNA, 23 nt, synthetic construct
  misc_feature 1..23: note = Description of Artificial Sequence: Synthetic oligonucleotide
  source 1..23: mol_type = other RNA
accttcctgtgttcccaaaccat

SEQ ID NO: 1209 - RNA, 23 nt, synthetic construct
  misc_feature 1..23: note = Description of Artificial Sequence: Synthetic oligonucleotide
  source 1..23: mol_type = other RNA
atgagatcttggcctgccatggt

SEQ ID NO: 1210 - RNA, 23 nt, synthetic construct
  misc_feature 1..23: note = Description of Artificial Sequence: Synthetic oligonucleotide
  source 1..23: mol_type = other RNA
acatacagctctcgtgtcccttt

SEQ ID NO: 1211 - RNA, 23 nt, synthetic construct
  misc_feature 1..23: note = Description of Artificial Sequence: Synthetic oligonucleotide
  source 1..23: mol_type = other RNA
acttgattgagtgttccttgtca

SEQ ID NO: 1212 - RNA, 23 nt, synthetic construct
  misc_feature 1..23: note = Description of Artificial Sequence: Synthetic oligonucleotide
  source 1..23: mol_type = other RNA
atctatctccaggtcccgcttct

SEQ ID NO: 1213 - RNA, 23 nt, synthetic construct
  misc_feature 1..23: note = Description of Artificial Sequence: Synthetic oligonucleotide
  source 1..23: mol_type = other RNA
atcagacacaaacagagctttga

SEQ ID NO: 1214 - RNA, 23 nt, synthetic construct
  misc_feature 1..23: note = Description of Artificial Sequence: Synthetic oligonucleotide
  source 1..23: mol_type = other RNA
atggagtttctccttcagccagg

SEQ ID NO: 1215 - RNA, 21 nt, synthetic construct
  misc_feature 1..21: note = Description of Artificial Sequence: Synthetic oligonucleotide
  source 1..21: mol_type = other RNA
  modified_base 1: mod_base = OTHER; note = 2'-O-methyladenosine-3'-phosphorothioate
  modified_base 2: mod_base = OTHER; note = 2'-O-methyladenosine-3'-phosphorothioate
  modified_base 3: mod_base = OTHER; note = 2'-O-methylguanosine-3'-phosphate
  modified_base 4: mod_base = OTHER; note = 2'-O-methylguanosine-3'-phosphate
  modified_base 5: mod_base = OTHER; note = 2'-O-methylguanosine-3'-phosphate
  modified_base 6: mod_base = OTHER; note = 2'-O-methyladenosine-3'-phosphate
  modified_base 7: mod_base = OTHER; note = 2'-fluoroadenosine-3'-phosphate
  modified_base 8: mod_base = OTHER; note = 2'-O-methyluridine-3'-phosphate
  modified_base 9: mod_base = OTHER; note = 2'-fluoroguanosine-3'-phosphate
  modified_base 10: mod_base = OTHER; note = 2'-fluorouridine-3'-phosphate
  modified_base 11: mod_base = OTHER; note = 2'-fluoroguanosine-3'-phosphate
  modified_base 12: mod_base = OTHER; note = 2'-O-methyladenosine-3'-phosphate
  modified_base 13: mod_base = OTHER; note = 2'-O-methylcytidine-3'-phosphate
  modified_base 14: mod_base = OTHER; note = 2'-O-methylcytidine-3'-phosphate
  modified_base 15: mod_base = OTHER; note = 2'-O-methyladenosine-3'-phosphate
  modified_base 16: mod_base = OTHER; note = 2'-O-methylguanosine-3'-phosphate
  modified_base 17: mod_base = OTHER; note = 2'-O-methylguanosine-3'-phosphate
  modified_base 18: mod_base = OTHER; note = 2'-O-methyluridine-3'-phosphate
  modified_base 19: mod_base = OTHER; note = 2'-O-methylcytidine-3'-phosphate
  modified_base 20: mod_base = OTHER; note = 2'-O-methyluridine-3'-phosphate
  modified_base 21: mod_base = OTHER; note = 2'-O-methyluridine-3'-phosphate N-[tris(GalNAc-alkyl)-amidodecanoyl)]-4-hydroxyprolinol (Hyp-(GalNAc-alkyl)3)
aagggaatgtgaccaggtctt

SEQ ID NO: 1216 - RNA, 21 nt, synthetic construct
  misc_feature 1..21: note = Description of Artificial Sequence: Synthetic oligonucleotide
  source 1..21: mol_type = other RNA
  modified_base 1: mod_base = OTHER; note = 2'-O-methylcytidine-3'-phosphorothioate
  modified_base 2: mod_base = OTHER; note = 2'-O-methylcytidine-3'-phosphorothioate
  modified_base 3: mod_base = OTHER; note = 2'-O-methyladenosine-3'-phosphate
  modified_base 4: mod_base = OTHER; note = 2'-O-methyladenosine-3'-phosphate
  modified_base 5: mod_base = OTHER; note = 2'-O-methylguanosine-3'-phosphate
  modified_base 6: mod_base = OTHER; note = 2'-O-methylcytidine-3'-phosphate
  modified_base 7: mod_base = OTHER; note = 2'-fluoroadenosine-3'-phosphate
  modified_base 8: mod_base = OTHER; note = 2'-O-methylguanosine-3'-phosphate
  modified_base 9: mod_base = OTHER; note = 2'-fluoroadenosine-3'-phosphate
  modified_base 10: mod_base = OTHER; note = 2'-fluorocytidine-3'-phosphate
  modified_base 11: mod_base = OTHER; note = 2'-fluoroadenosine-3'-phosphate
  modified_base 12: mod_base = OTHER; note = 2'-O-methyladenosine-3'-phosphate
  modified_base 13: mod_base = OTHER; note = 2'-O-methylguanosine-3'-phosphate
  modified_base 14: mod_base = OTHER; note = 2'-O-methylcytidine-3'-phosphate
  modified_base 15: mod_base = OTHER; note = 2'-O-methyladenosine-3'-phosphate
  modified_base 16: mod_base = OTHER; note = 2'-O-methyladenosine-3'-phosphate
  modified_base 17: mod_base = OTHER; note = 2'-O-methyladenosine-3'-phosphate
  modified_base 18: mod_base = OTHER; note = 2'-O-methylguanosine-3'-phosphate
  modified_base 19: mod_base = OTHER; note = 2'-O-methylcytidine-3'-phosphate
  modified_base 20: mod_base = OTHER; note = 2'-O-methyladenosine-3'-phosphate
  modified_base 21: mod_base = OTHER; note = 2'-O-methyluridine-3'-phosphate N-[tris(GalNAc-alkyl)-amidodecanoyl)]-4-hydroxyprolinol (Hyp-(GalNAc-alkyl)3)
ccaagcagacaagcaaagcat

SEQ ID NO: 1217 - RNA, 21 nt, synthetic construct
  misc_feature 1..21: note = Description of Artificial Sequence: Synthetic oligonucleotide
  source 1..21: mol_type = other RNA
  modified_base 1: mod_base = OTHER; note = 2'-O-methylguanosine-3'-phosphorothioate
  modified_base 2: mod_base = OTHER; note = 2'-O-methylcytidine-3'-phosphorothioate
  modified_base 3: mod_base = OTHER; note = 2'-O-methylcytidine-3'-phosphate
  modified_base 4: mod_base = OTHER; note = 2'-O-methyladenosine-3'-phosphate
  modified_base 5: mod_base = OTHER; note = 2'-O-methylguanosine-3'-phosphate
  modified_base 6: mod_base = OTHER; note = 2'-O-methylguanosine-3'-phosphate
  modified_base 7: mod_base = OTHER; note = 2'-fluoroadenosine-3'-phosphate
  modified_base 8: mod_base = OTHER; note = 2'-O-methylcytidine-3'-phosphate
  modified_base 9: mod_base = OTHER; note = 2'-fluoroadenosine-3'-phosphate
  modified_base 10: mod_base = OTHER; note = 2'-fluorocytidine-3'-phosphate
  modified_base 11: mod_base = OTHER; note = 2'-fluoroadenosine-3'-phosphate
  modified_base 12: mod_base = OTHER; note = 2'-O-methylcytidine-3'-phosphate
  modified_base 13: mod_base = OTHER; note = 2'-O-methylcytidine-3'-phosphate
  modified_base 14: mod_base = OTHER; note = 2'-O-methyladenosine-3'-phosphate
  modified_base 15: mod_base = OTHER; note = 2'-O-methyluridine-3'-phosphate
  modified_base 16: mod_base = OTHER; note = 2'-O-methylcytidine-3'-phosphate
  modified_base 17: mod_base = OTHER; note = 2'-O-methylcytidine-3'-phosphate
  modified_base 18: mod_base = OTHER; note = 2'-O-methyluridine-3'-phosphate
  modified_base 19: mod_base = OTHER; note = 2'-O-methylguanosine-3'-phosphate
  modified_base 20: mod_base = OTHER; note = 2'-O-methylcytidine-3'-phosphate
  modified_base 21: mod_base = OTHER; note = 2'-O-methyluridine-3'-phosphate N-[tris(GalNAc-alkyl)-amidodecanoyl)]-4-hydroxyprolinol (Hyp-(GalNAc-alkyl)3)
gccaggacacaccatcctgct

SEQ ID NO: 1218 - RNA, 21 nt, synthetic construct
  misc_feature 1..21: note = Description of Artificial Sequence: Synthetic oligonucleotide
  source 1..21: mol_type = other RNA
  modified_base 1: mod_base = OTHER; note = 2'-O-methylcytidine-3'-phosphorothioate
  modified_base 2: mod_base = OTHER; note = 2'-O-methylcytidine-3'-phosphorothioate
  modified_base 3: mod_base = OTHER; note = 2'-O-methyladenosine-3'-phosphate
  modified_base 4: mod_base = OTHER; note = 2'-O-methylguanosine-3'-phosphate
  modified_base 5: mod_base = OTHER; note = 2'-O-methylcytidine-3'-phosphate
  modified_base 6: mod_base = OTHER; note = 2'-O-methyluridine-3'-phosphate
  modified_base 7: mod_base = OTHER; note = 2'-fluorouridine-3'-phosphate
  modified_base 8: mod_base = OTHER; note = 2'-O-methylcytidine-3'-phosphate
  modified_base 9: mod_base = OTHER; note = 2'-fluorouridine-3'-phosphate
  modified_base 10: mod_base = OTHER; note = 2'-fluorocytidine-3'-phosphate
  modified_base 11: mod_base = OTHER; note = 2'-fluorouridine-3'-phosphate
  modified_base 12: mod_base = OTHER; note = 2'-O-methylcytidine-3'-phosphate
  modified_base 13: mod_base = OTHER; note = 2'-O-methylcytidine-3'-phosphate
  modified_base 14: mod_base = OTHER; note = 2'-O-methyluridine-3'-phosphate
  modified_base 15: mod_base = OTHER; note = 2'-O-methylguanosine-3'-phosphate
  modified_base 16: mod_base = OTHER; note = 2'-O-methylcytidine-3'-phosphate
  modified_base 17: mod_base = OTHER; note = 2'-O-methylcytidine-3'-phosphate
  modified_base 18: mod_base = OTHER; note = 2'-O-methyluridine-3'-phosphate
  modified_base 19: mod_base = OTHER; note = 2'-O-methyluridine-3'-phosphate
  modified_base 20: mod_base = OTHER; note = 2'-O-methylcytidine-3'-phosphate
  modified_base 21: mod_base = OTHER; note = 2'-O-methyluridine-3'-phosphate N-[tris(GalNAc-alkyl)-amidodecanoyl)]-4-hydroxyprolinol (Hyp-(GalNAc-alkyl)3)
ccagcttctctcctgccttct

SEQ ID NO: 1219 - RNA, 21 nt, synthetic construct
  misc_feature 1..21: note = Description of Artificial Sequence: Synthetic oligonucleotide
  source 1..21: mol_type = other RNA
  modified_base 1: mod_base = OTHER; note = 2'-O-methyluridine-3'-phosphorothioate
  modified_base 2: mod_base = OTHER; note = 2'-O-methylguanosine-3'-phosphorothioate
  modified_base 3: mod_base = OTHER; note = 2'-O-methylcytidine-3'-phosphate
  modified_base 4: mod_base = OTHER; note = 2'-O-methylcytidine-3'-phosphate
  modified_base 5: mod_base = OTHER; note = 2'-O-methyluridine-3'-phosphate
  modified_base 6: mod_base = OTHER; note = 2'-O-methylguanosine-3'-phosphate
  modified_base 7: mod_base = OTHER; note = 2'-fluoroadenosine-3'-phosphate
  modified_base 8: mod_base = OTHER; note = 2'-O-methyluridine-3'-phosphate
  modified_base 9: mod_base = OTHER; note = 2'-fluoroguanosine-3'-phosphate
  modified_base 10: mod_base = OTHER; note = 2'-fluorocytidine-3'-phosphate
  modified_base 11: mod_base = OTHER; note = 2'-fluorocytidine-3'-phosphate
  modified_base 12: mod_base = OTHER; note = 2'-O-methylcytidine-3'-phosphate
  modified_base 13: mod_base = OTHER; note = 2'-O-methyluridine-3'-phosphate
  modified_base 14: mod_base = OTHER; note = 2'-O-methyluridine-3'-phosphate
  modified_base 15: mod_base = OTHER; note = 2'-O-methyluridine-3'-phosphate
  modified_base 16: mod_base = OTHER; note = 2'-O-methyladenosine-3'-phosphate
  modified_base 17: mod_base = OTHER; note = 2'-O-methyluridine-3'-phosphate
  modified_base 18: mod_base = OTHER; note = 2'-O-methylcytidine-3'-phosphate
  modified_base 19: mod_base = OTHER; note = 2'-O-methyluridine-3'-phosphate
  modified_base 20: mod_base = OTHER; note = 2'-O-methyluridine-3'-phosphate
  modified_base 21: mod_base = OTHER; note = 2'-O-methyluridine-3'-phosphate N-[tris(GalNAc-alkyl)-amidodecanoyl)]-4-hydroxyprolinol (Hyp-(GalNAc-alkyl)3)
tgcctgatgccctttatcttt

SEQ ID NO: 1220 - RNA, 21 nt, synthetic construct
  misc_feature 1..21: note = Description of Artificial Sequence: Synthetic oligonucleotide
  source 1..21: mol_type = other RNA
  modified_base 1: mod_base = OTHER; note = 2'-O-methyluridine-3'-phosphorothioate
  modified_base 2: mod_base = OTHER; note = 2'-O-methylguanosine-3'-phosphorothioate
  modified_base 3: mod_base = OTHER; note = 2'-O-methylguanosine-3'-phosphate
  modified_base 4: mod_base = OTHER; note = 2'-O-methylguanosine-3'-phosphate
  modified_base 5: mod_base = OTHER; note = 2'-O-methylcytidine-3'-phosphate
  modified_base 6: mod_base = OTHER; note = 2'-O-methylcytidine-3'-phosphate
  modified_base 7: mod_base = OTHER; note = 2'-fluorouridine-3'-phosphate
  modified_base 8: mod_base = OTHER; note = 2'-O-methylcytidine-3'-phosphate
  modified_base 9: mod_base = OTHER; note = 2'-fluorouridine-3'-phosphate
  modified_base 10: mod_base = OTHER; note = 2'-fluorouridine-3'-phosphate
  modified_base 11: mod_base = OTHER; note = 2'-fluoroguanosine-3'-phosphate
  modified_base 12: mod_base = OTHER; note = 2'-O-methyluridine-3'-phosphate
  modified_base 13: mod_base = OTHER; note = 2'-O-methylcytidine-3'-phosphate
  modified_base 14: mod_base = OTHER; note = 2'-O-methyluridine-3'-phosphate
  modified_base 15: mod_base = OTHER; note = 2'-O-methylguanosine-3'-phosphate
  modified_base 16: mod_base = OTHER; note = 2'-O-methylguanosine-3'-phosphate
  modified_base 17: mod_base = OTHER; note = 2'-O-methyladenosine-3'-phosphate
  modified_base 18: mod_base = OTHER; note = 2'-O-methylguanosine-3'-phosphate
  modified_base 19: mod_base = OTHER; note = 2'-O-methylguanosine-3'-phosphate
  modified_base 20: mod_base = OTHER; note = 2'-O-methyluridine-3'-phosphate
  modified_base 21: mod_base = OTHER; note = 2'-O-methyluridine-3'-phosphate N-[tris(GalNAc-alkyl)-amidodecanoyl)]-4-hydroxyprolinol (Hyp-(GalNAc-alkyl)3)
tgggcctcttgtctggaggtt

SEQ ID NO: 1221 - RNA, 21 nt, synthetic construct
  misc_feature 1..21: note = Description of Artificial Sequence: Synthetic oligonucleotide
  source 1..21: mol_type = other RNA
  modified_base 1: mod_base = OTHER; note = 2'-O-methylcytidine-3'-phosphorothioate
  modified_base 2: mod_base = OTHER; note = 2'-O-methylcytidine-3'-phosphorothioate
  modified_base 3: mod_base = OTHER; note = 2'-O-methyladenosine-3'-phosphate
  modified_base 4: mod_base = OTHER; note = 2'-O-methylcytidine-3'-phosphate
  modified_base 5: mod_base = OTHER; note = 2'-O-methylcytidine-3'-phosphate
  modified_base 6: mod_base = OTHER; note = 2'-O-methyladenosine-3'-phosphate
  modified_base 7: mod_base = OTHER; note = 2'-fluorocytidine-3'-phosphate
  modified_base 8: mod_base = OTHER; note = 2'-O-methyluridine-3'-phosphate
  modified_base 9: mod_base = OTHER; note = 2'-fluorocytidine-3'-phosphate
  modified_base 10: mod_base = OTHER; note = 2'-fluorocytidine-3'-phosphate
  modified_base 11: mod_base = OTHER; note = 2'-fluoroadenosine-3'-phosphate
  modified_base 12: mod_base = OTHER; note = 2'-O-methyluridine-3'-phosphate
  modified_base 13: mod_base = OTHER; note = 2'-O-methylguanosine-3'-phosphate
  modified_base 14: mod_base = OTHER; note = 2'-O-methylguanosine-3'-phosphate
  modified_base 15: mod_base = OTHER; note = 2'-O-methyluridine-3'-phosphate
  modified_base 16: mod_base = OTHER; note = 2'-O-methylcytidine-3'-phosphate
  modified_base 17: mod_base = OTHER; note = 2'-O-methyluridine-3'-phosphate
  modified_base 18: mod_base = OTHER; note = 2'-O-methyluridine-3'-phosphate
  modified_base 19: mod_base = OTHER; note = 2'-O-methyluridine-3'-phosphate
  modified_base 20: mod_base = OTHER; note = 2'-O-methylguanosine-3'-phosphate
  modified_base 21: mod_base = OTHER; note = 2'-O-methyluridine-3'-phosphate N-[tris(GalNAc-alkyl)-amidodecanoyl)]-4-hydroxyprolinol (Hyp-(GalNAc-alkyl)3)
ccaccactccatggtctttgt

SEQ ID NO: 1222 - RNA, 21 nt, synthetic construct
  misc_feature 1..21: note = Description of Artificial Sequence: Synthetic oligonucleotide
  source 1..21: mol_type = other RNA
  modified_base 1: mod_base = OTHER; note = 2'-O-methyluridine-3'-phosphorothioate
  modified_base 2: mod_base = OTHER; note = 2'-O-methylcytidine-3'-phosphorothioate
  modified_base 3: mod_base = OTHER; note = 2'-O-methylcytidine-3'-phosphate
  modified_base 4: mod_base = OTHER; note = 2'-O-methyluridine-3'-phosphate
  modified_base 5: mod_base = OTHER; note = 2'-O-methyluridine-3'-phosphate
  modified_base 6: mod_base = OTHER; note = 2'-O-methylcytidine-3'-phosphate
  modified_base 7: mod_base = OTHER; note = 2'-fluorocytidine-3'-phosphate
  modified_base 8: mod_base = OTHER; note = 2'-O-methylguanosine-3'-phosphate
  modified_base 9: mod_base = OTHER; note = 2'-fluoroadenosine-3'-phosphate
  modified_base 10: mod_base = OTHER; note = 2'-fluorocytidine-3'-phosphate
  modified_base 11: mod_base = OTHER; note = 2'-fluorouridine-3'-phosphate
  modified_base 12: mod_base = OTHER; note = 2'-O-methyluridine-3'-phosphate
  modified_base 13: mod_base = OTHER; note = 2'-O-methylcytidine-3'-phosphate
  modified_base 14: mod_base = OTHER; note = 2'-O-methyluridine-3'-phosphate
  modified_base 15: mod_base = OTHER; note = 2'-O-methylcytidine-3'-phosphate
  modified_base 16: mod_base = OTHER; note = 2'-O-methylcytidine-3'-phosphate
  modified_base 17: mod_base = OTHER; note = 2'-O-methyladenosine-3'-phosphate
  modified_base 18: mod_base = OTHER; note = 2'-O-methyladenosine-3'-phosphate
  modified_base 19: mod_base = OTHER; note = 2'-O-methylguanosine-3'-phosphate
  modified_base 20: mod_base = OTHER; note = 2'-O-methyladenosine-3'-phosphate
  modified_base 21: mod_base = OTHER; note = 2'-O-methyluridine-3'-phosphate N-[tris(GalNAc-alkyl)-amidodecanoyl)]-4-hydroxyprolinol (Hyp-(GalNAc-alkyl)3)
tccttccgacttctccaagat

SEQ ID NO: 1223 - RNA, 21 nt, synthetic construct
  misc_feature 1..21: note = Description of Artificial Sequence: Synthetic oligonucleotide
  source 1..21: mol_type = other RNA
  modified_base 1: mod_base = OTHER; note = 2'-O-methyladenosine-3'-phosphorothioate
  modified_base 2: mod_base = OTHER; note = 2'-O-methylguanosine-3'-phosphorothioate
  modified_base 3: mod_base = OTHER; note = 2'-O-methylguanosine-3'-phosphate
  modified_base 4: mod_base = OTHER; note = 2'-O-methylcytidine-3'-phosphate
  modified_base 5: mod_base = OTHER; note = 2'-O-methyladenosine-3'-phosphate
  modified_base 6: mod_base = OTHER; note = 2'-O-methylcytidine-3'-phosphate
  modified_base 7: mod_base = OTHER; note = 2'-fluorouridine-3'-phosphate
  modified_base 8: mod_base = OTHER; note = 2'-O-methylguanosine-3'-phosphate
  modified_base 9: mod_base = OTHER; note = 2'-fluoroguanosine-3'-phosphate
  modified_base 10: mod_base = OTHER; note = 2'-fluoroadenosine-3'-phosphate
  modified_base 11: mod_base = OTHER; note = 2'-fluoroguanosine-3'-phosphate
  modified_base 12: mod_base = OTHER; note = 2'-O-methyluridine-3'-phosphate
  modified_base 13: mod_base = OTHER; note = 2'-O-methyladenosine-3'-phosphate
  modified_base 14: mod_base = OTHER; note = 2'-O-methylcytidine-3'-phosphate
  modified_base 15: mod_base = OTHER; note = 2'-O-methylguanosine-3'-phosphate
  modified_base 16: mod_base = OTHER; note = 2'-O-methyluridine-3'-phosphate
  modified_base 17: mod_base = OTHER; note = 2'-O-methylguanosine-3'-phosphate
  modified_base 18: mod_base = OTHER; note = 2'-O-methyluridine-3'-phosphate
  modified_base 19: mod_base = OTHER; note = 2'-O-methylguanosine-3'-phosphate
  modified_base 20: mod_base = OTHER; note = 2'-O-methyluridine-3'-phosphate
  modified_base 21: mod_base = OTHER; note = 2'-O-methyluridine-3'-phosphate N-[tris(GalNAc-alkyl)-amidodecanoyl)]-4-hydroxyprolinol (Hyp-(GalNAc-alkyl)3)
aggcactggagtacgtgtgtt

SEQ ID NO: 1224 - RNA, 21 nt, synthetic construct
  misc_feature 1..21: note = Description of Artificial Sequence: Synthetic oligonucleotide
  source 1..21: mol_type = other RNA
  modified_base 1: mod_base = OTHER; note = 2'-O-methyluridine-3'-phosphorothioate
  modified_base 2: mod_base = OTHER; note = 2'-O-methylguanosine-3'-phosphorothioate
  modified_base 3: mod_base = OTHER; note = 2'-O-methyluridine-3'-phosphate
  modified_base 4: mod_base = OTHER; note = 2'-O-methylguanosine-3'-phosphate
  modified_base 5: mod_base = OTHER; note = 2'-O-methyluridine-3'-phosphate
  modified_base 6: mod_base = OTHER; note = 2'-O-methylcytidine-3'-phosphate
  modified_base 7: mod_base = OTHER; note = 2'-fluorocytidine-3'-phosphate
  modified_base 8: mod_base = OTHER; note = 2'-O-methyluridine-3'-phosphate
  modified_base 9: mod_base = OTHER; note = 2'-fluorouridine-3'-phosphate
  modified_base 10: mod_base = OTHER; note = 2'-fluorocytidine-3'-phosphate
  modified_base 11: mod_base = OTHER; note = 2'-fluorouridine-3'-phosphate
  modified_base 12: mod_base = OTHER; note = 2'-O-methylguanosine-3'-phosphate
  modified_base 13: mod_base = OTHER; note = 2'-O-methylguanosine-3'-phosphate
  modified_base 14: mod_base = OTHER; note = 2'-O-methylcytidine-3'-phosphate
  modified_base 15: mod_base = OTHER; note = 2'-O-methyluridine-3'-phosphate
  modified_base 16: mod_base = OTHER; note = 2'-O-methyluridine-3'-phosphate
  modified_base 17: mod_base = OTHER; note = 2'-O-methylcytidine-3'-phosphate
  modified_base 18: mod_base = OTHER; note = 2'-O-methyluridine-3'-phosphate
  modified_base 19: mod_base = OTHER; note = 2'-O-methyladenosine-3'-phosphate
  modified_base 20: mod_base = OTHER; note = 2'-O-methylcytidine-3'-phosphate
  modified_base 21: mod_base = OTHER; note = 2'-O-methyluridine-3'-phosphate N-[tris(GalNAc-alkyl)-amidodecanoyl)]-4-hydroxyprolinol (Hyp-(GalNAc-alkyl)3)
tgtgtccttctggcttctact

SEQ ID NO: 1225 - RNA, 21 nt, synthetic construct
  misc_feature 1..21: note = Description of Artificial Sequence: Synthetic oligonucleotide
  source 1..21: mol_type = other RNA
  modified_base 1: mod_base = OTHER; note = 2'-O-methyluridine-3'-phosphorothioate
  modified_base 2: mod_base = OTHER; note = 2'-O-methyladenosine-3'-phosphorothioate
  modified_base 3: mod_base = OTHER; note = 2'-O-methylcytidine-3'-phosphate
  modified_base 4: mod_base = OTHER; note = 2'-O-methylcytidine-3'-phosphate
  modified_base 5: mod_base = OTHER; note = 2'-O-methylcytidine-3'-phosphate
  modified_base 6: mod_base = OTHER; note = 2'-O-methylguanosine-3'-phosphate
  modified_base 7: mod_base = OTHER; note = 2'-fluorouridine-3'-phosphate
  modified_base 8: mod_base = OTHER; note = 2'-O-methyladenosine-3'-phosphate
  modified_base 9: mod_base = OTHER; note = 2'-fluorocytidine-3'-phosphate
  modified_base 10: mod_base = OTHER; note = 2'-fluorocytidine-3'-phosphate
  modified_base 11: mod_base = OTHER; note = 2'-fluorocytidine-3'-phosphate
  modified_base 12: mod_base = OTHER; note = 2'-O-methyluridine-3'-phosphate
  modified_base 13: mod_base = OTHER; note = 2'-O-methylguanosine-3'-phosphate
  modified_base 14: mod_base = OTHER; note = 2'-O-methyluridine-3'-phosphate
  modified_base 15: mod_base = OTHER; note = 2'-O-methylguanosine-3'-phosphate
  modified_base 16: mod_base = OTHER; note = 2'-O-methylcytidine-3'-phosphate
  modified_base 17: mod_base = OTHER; note = 2'-O-methyladenosine-3'-phosphate
  modified_base 18: mod_base = OTHER; note = 2'-O-methylguanosine-3'-phosphate
  modified_base 19: mod_base = OTHER; note = 2'-O-methyladenosine-3'-phosphate
  modified_base 20: mod_base = OTHER; note = 2'-O-methylcytidine-3'-phosphate
  modified_base 21: mod_base = OTHER; note = 2'-O-methyluridine-3'-phosphate N-[tris(GalNAc-alkyl)-amidodecanoyl)]-4-hydroxyprolinol (Hyp-(GalNAc-alkyl)3)
tacccgtaccctgtgcagact

SEQ ID NO: 1226 - RNA, 21 nt, synthetic construct
  misc_feature 1..21: note = Description of Artificial Sequence: Synthetic oligonucleotide
  source 1..21: mol_type = other RNA
  modified_base 1: mod_base = OTHER; note = 2'-O-methyladenosine-3'-phosphorothioate
  modified_base 2: mod_base = OTHER; note = 2'-O-methylguanosine-3'-phosphorothioate
  modified_base 3: mod_base = OTHER; note = 2'-O-methyladenosine-3'-phosphate
  modified_base 4: mod_base = OTHER; note = 2'-O-methylcytidine-3'-phosphate
  modified_base 5: mod_base = OTHER; note = 2'-O-methyladenosine-3'-phosphate
  modified_base 6: mod_base = OTHER; note = 2'-O-methylcytidine-3'-phosphate
  modified_base 7: mod_base = OTHER; note = 2'-fluoroguanosine-3'-phosphate
  modified_base 8: mod_base = OTHER; note = 2'-O-methyluridine-3'-phosphate
  modified_base 9: mod_base = OTHER; note = 2'-fluoroadenosine-3'-phosphate
  modified_base 10: mod_base = OTHER; note = 2'-fluorocytidine-3'-phosphate
  modified_base 11: mod_base = OTHER; note = 2'-fluorocytidine-3'-phosphate
  modified_base 12: mod_base = OTHER; note = 2'-O-methyluridine-3'-phosphate
  modified_base 13: mod_base = OTHER; note = 2'-O-methylguanosine-3'-phosphate
  modified_base 14: mod_base = OTHER; note = 2'-O-methylcytidine-3'-phosphate
  modified_base 15: mod_base = OTHER; note = 2'-O-methyladenosine-3'-phosphate
  modified_base 16: mod_base = OTHER; note = 2'-O-methylguanosine-3'-phosphate
  modified_base 17: mod_base = OTHER; note = 2'-O-methyladenosine-3'-phosphate
  modified_base 18: mod_base = OTHER; note = 2'-O-methyluridine-3'-phosphate
  modified_base 19: mod_base = OTHER; note = 2'-O-methylcytidine-3'-phosphate
  modified_base 20: mod_base = OTHER; note = 2'-O-methyluridine-3'-phosphate
  modified_base 21: mod_base = OTHER; note = 2'-O-methyluridine-3'-phosphate N-[tris(GalNAc-alkyl)-amidodecanoyl)]-4-hydroxyprolinol (Hyp-(GalNAc-alkyl)3)
agacacgtacctgcagatctt

SEQ ID NO: 1227 - RNA, 21 nt, synthetic construct
  misc_feature 1..21: note = Description of Artificial Sequence: Synthetic oligonucleotide
  source 1..21: mol_type = other RNA
  modified_base 1: mod_base = OTHER; note = 2'-O-methyladenosine-3'-phosphorothioate
  modified_base 2: mod_base = OTHER; note = 2'-O-methylguanosine-3'-phosphorothioate
  modified_base 3: mod_base = OTHER; note = 2'-O-methyladenosine-3'-phosphate
  modified_base 4: mod_base = OTHER; note = 2'-O-methylcytidine-3'-phosphate
  modified_base 5: mod_base = OTHER; note = 2'-O-methyluridine-3'-phosphate
  modified_base 6: mod_base = OTHER; note = 2'-O-methylcytidine-3'-phosphate
  modified_base 7: mod_base = OTHER; note = 2'-fluoroadenosine-3'-phosphate
  modified_base 8: mod_base = OTHER; note = 2'-O-methyladenosine-3'-phosphate
  modified_base 9: mod_base = OTHER; note = 2'-fluoroguanosine-3'-phosphate
  modified_base 10: mod_base = OTHER; note = 2'-fluoroadenosine-3'-phosphate
  modified_base 11: mod_base = OTHER; note = 2'-fluorocytidine-3'-phosphate
  modified_base 12: mod_base = OTHER; note = 2'-O-methylcytidine-3'-phosphate
  modified_base 13: mod_base = OTHER; note = 2'-O-methyladenosine-3'-phosphate
  modified_base 14: mod_base = OTHER; note = 2'-O-methyladenosine-3'-phosphate
  modified_base 15: mod_base = OTHER; note = 2'-O-methyladenosine-3'-phosphate
  modified_base 16: mod_base = OTHER; note = 2'-O-methyladenosine-3'-phosphate
  modified_base 17: mod_base = OTHER; note = 2'-O-methylguanosine-3'-phosphate
  modified_base 18: mod_base = OTHER; note = 2'-O-methyladenosine-3'-phosphate
  modified_base 19: mod_base = OTHER; note = 2'-O-methylcytidine-3'-phosphate
  modified_base 20: mod_base = OTHER; note = 2'-O-methyluridine-3'-phosphate
  modified_base 21: mod_base = OTHER; note = 2'-O-methyluridine-3'-phosphate N-[tris(GalNAc-alkyl)-amidodecanoyl)]-4-hydroxyprolinol (Hyp-(GalNAc-alkyl)3)
agactcaagaccaaaagactt

SEQ ID NO: 1228 - RNA, 21 nt, synthetic construct
  misc_feature 1..21: note = Description of Artificial Sequence: Synthetic oligonucleotide
  source 1..21: mol_type = other RNA
  modified_base 1: mod_base = OTHER; note = 2'-O-methyladenosine-3'-phosphorothioate
  modified_base 2: mod_base = OTHER; note = 2'-O-methylguanosine-3'-phosphorothioate
  modified_base 3: mod_base = OTHER; note = 2'-O-methyluridine-3'-phosphate
  modified_base 4: mod_base = OTHER; note = 2'-O-methylguanosine-3'-phosphate
  modified_base 5: mod_base = OTHER; note = 2'-O-methylcytidine-3'-phosphate
  modified_base 6: mod_base = OTHER; note = 2'-O-methyladenosine-3'-phosphate
  modified_base 7: mod_base = OTHER; note = 2'-fluoroguanosine-3'-phosphate
  modified_base 8: mod_base = OTHER; note = 2'-O-methyladenosine-3'-phosphate
  modified_base 9: mod_base = OTHER; note = 2'-fluoroguanosine-3'-phosphate
  modified_base 10: mod_base = OTHER; note = 2'-fluorocytidine-3'-phosphate
  modified_base 11: mod_base = OTHER; note = 2'-fluoroadenosine-3'-phosphate
  modified_base 12: mod_base = OTHER; note = 2'-O-methyladenosine-3'-phosphate
  modified_base 13: mod_base = OTHER; note = 2'-O-methyluridine-3'-phosphate
  modified_base 14: mod_base = OTHER; note = 2'-O-methylcytidine-3'-phosphate
  modified_base 15: mod_base = OTHER; note = 2'-O-methylcytidine-3'-phosphate
  modified_base 16: mod_base = OTHER; note = 2'-O-methyladenosine-3'-phosphate
  modified_base 17: mod_base = OTHER; note = 2'-O-methylcytidine-3'-phosphate
  modified_base 18: mod_base = OTHER; note = 2'-O-methyluridine-3'-phosphate
  modified_base 19: mod_base = OTHER; note = 2'-O-methylguanosine-3'-phosphate
  modified_base 20: mod_base = OTHER; note = 2'-O-methyluridine-3'-phosphate
  modified_base 21: mod_base = OTHER; note = 2'-O-methyluridine-3'-phosphate N-[tris(GalNAc-alkyl)-amidodecanoyl)]-4-hydroxyprolinol (Hyp-(GalNAc-alkyl)3)
agtgcagagcaatccactgtt

SEQ ID NO: 1229 - RNA, 21 nt, synthetic construct
  misc_feature 1..21: note = Description of Artificial Sequence: Synthetic oligonucleotide
  source 1..21: mol_type = other RNA
  modified_base 1: mod_base = OTHER; note = 2'-O-methyladenosine-3'-phosphorothioate
  modified_base 2: mod_base = OTHER; note = 2'-O-methylcytidine-3'-phosphorothioate
  modified_base 3: mod_base = OTHER; note = 2'-O-methylcytidine-3'-phosphate
  modified_base 4: mod_base = OTHER; note = 2'-O-methyladenosine-3'-phosphate
  modified_base 5: mod_base = OTHER; note = 2'-O-methylcytidine-3'-phosphate
  modified_base 6: mod_base = OTHER; note = 2'-O-methyladenosine-3'-phosphate
  modified_base 7: mod_base = OTHER; note = 2'-fluorocytidine-3'-phosphate
  modified_base 8: mod_base = OTHER; note = 2'-O-methylguanosine-3'-phosphate
  modified_base 9: mod_base = OTHER; note = 2'-fluoroadenosine-3'-phosphate
  modified_base 10: mod_base = OTHER; note = 2'-fluorocytidine-3'-phosphate
  modified_base 11: mod_base = OTHER; note = 2'-fluorouridine-3'-phosphate
  modified_base 12: mod_base = OTHER; note = 2'-O-methyluridine-3'-phosphate
  modified_base 13: mod_base = OTHER; note = 2'-O-methylcytidine-3'-phosphate
  modified_base 14: mod_base = OTHER; note = 2'-O-methylguanosine-3'-phosphate
  modified_base 15: mod_base = OTHER; note = 2'-O-methyladenosine-3'-phosphate
  modified_base 16: mod_base = OTHER; note = 2'-O-methylguanosine-3'-phosphate
  modified_base 17: mod_base = OTHER; note = 2'-O-methyladenosine-3'-phosphate
  modified_base 18: mod_base = OTHER; note = 2'-O-methyladenosine-3'-phosphate
  modified_base 19: mod_base = OTHER; note = 2'-O-methylcytidine-3'-phosphate
  modified_base 20: mod_base = OTHER; note = 2'-O-methylguanosine-3'-phosphate
  modified_base 21: mod_base = OTHER; note = 2'-O-methyluridine-3'-phosphate N-[tris(GalNAc-alkyl)-amidodecanoyl)]-4-hydroxyprolinol (Hyp-(GalNAc-alkyl)3)
accacacgacttcgagaacgt

SEQ ID NO: 1230 - RNA, 21 nt, synthetic construct
  misc_feature 1..21: note = Description of Artificial Sequence: Synthetic oligonucleotide
  source 1..21: mol_type = other RNA
  modified_base 1: mod_base = OTHER; note = 2'-O-methylcytidine-3'-phosphorothioate
  modified_base 2: mod_base = OTHER; note = 2'-O-methylcytidine-3'-phosphorothioate
  modified_base 3: mod_base = OTHER; note = 2'-O-methyluridine-3'-phosphate
  modified_base 4: mod_base = OTHER; note = 2'-O-methyladenosine-3'-phosphate
  modified_base 5: mod_base = OTHER; note = 2'-O-methylcytidine-3'-phosphate
  modified_base 6: mod_base = OTHER; note = 2'-O-methyluridine-3'-phosphate
  modified_base 7: mod_base = OTHER; note = 2'-fluoroadenosine-3'-phosphate
  modified_base 8: mod_base = OTHER; note = 2'-O-methylcytidine-3'-phosphate
  modified_base 9: mod_base = OTHER; note = 2'-fluoroadenosine-3'-phosphate
  modified_base 10: mod_base = OTHER; note = 2'-fluoroadenosine-3'-phosphate
  modified_base 11: mod_base = OTHER; note = 2'-fluorouridine-3'-phosphate
  modified_base 12: mod_base = OTHER; note = 2'-O-methylguanosine-3'-phosphate
  modified_base 13: mod_base = OTHER; note = 2'-O-methyluridine-3'-phosphate
  modified_base 14: mod_base = OTHER; note = 2'-O-methylguanosine-3'-phosphate
  modified_base 15: mod_base = OTHER; note = 2'-O-methyladenosine-3'-phosphate
  modified_base 16: mod_base = OTHER; note = 2'-O-methylguanosine-3'-phosphate
  modified_base 17: mod_base = OTHER; note = 2'-O-methyluridine-3'-phosphate
  modified_base 18: mod_base = OTHER; note = 2'-O-methylguanosine-3'-phosphate
  modified_base 19: mod_base = OTHER; note = 2'-O-methyladenosine-3'-phosphate
  modified_base 20: mod_base = OTHER; note = 2'-O-methyluridine-3'-phosphate
  modified_base 21: mod_base = OTHER; note = 2'-O-methyluridine-3'-phosphate N-[tris(GalNAc-alkyl)-amidodecanoyl)]-4-hydroxyprolinol (Hyp-(GalNAc-alkyl)3)
cctactacaatgtgagtgatt

SEQ ID NO: 1231 - RNA, 21 nt, synthetic construct
  misc_feature 1..21: note = Description of Artificial Sequence: Synthetic oligonucleotide
  source 1..21: mol_type = other RNA
  modified_base 1: mod_base = OTHER; note = 2'-O-methyluridine-3'-phosphorothioate
  modified_base 2: mod_base = OTHER; note = 2'-O-methylguanosine-3'-phosphorothioate
  modified_base 3: mod_base = OTHER; note = 2'-O-methyladenosine-3'-phosphate
  modified_base 4: mod_base = OTHER; note = 2'-O-methyluridine-3'-phosphate
  modified_base 5: mod_base = OTHER; note = 2'-O-methylguanosine-3'-phosphate
  modified_base 6: mod_base = OTHER; note = 2'-O-methyladenosine-3'-phosphate
  modified_base 7: mod_base = OTHER; note = 2'-fluoroguanosine-3'-phosphate
  modified_base 8: mod_base = OTHER; note = 2'-O-methyladenosine-3'-phosphate
  modified_base 9: mod_base = OTHER; note = 2'-fluorouridine-3'-phosphate
  modified_base 10: mod_base = OTHER; note = 2'-fluorocytidine-3'-phosphate
  modified_base 11: mod_base = OTHER; note = 2'-fluorouridine-3'-phosphate
  modified_base 12: mod_base = OTHER; note = 2'-O-methylcytidine-3'-phosphate
  modified_base 13: mod_base = OTHER; note = 2'-O-methyluridine-3'-phosphate
  modified_base 14: mod_base = OTHER; note = 2'-O-methyluridine-3'-phosphate
  modified_base 15: mod_base = OTHER; note = 2'-O-methyluridine-3'-phosphate
  modified_base 16: mod_base = OTHER; note = 2'-O-methylcytidine-3'-phosphate
  modified_base 17: mod_base = OTHER; note = 2'-O-methylcytidine-3'-phosphate
  modified_base 18: mod_base = OTHER; note = 2'-O-methyladenosine-3'-phosphate
  modified_base 19: mod_base = OTHER; note = 2'-O-methylcytidine-3'-phosphate
  modified_base 20: mod_base = OTHER; note = 2'-O-methyluridine-3'-phosphate
  modified_base 21: mod_base = OTHER; note = 2'-O-methyluridine-3'-phosphate N-[tris(GalNAc-alkyl)-amidodecanoyl)]-4-hydroxyprolinol (Hyp-(GalNAc-alkyl)3)
tgatgagatctctttccactt

SEQ ID NO: 1232 - RNA, 21 nt, synthetic construct
  misc_feature 1..21: note = Description of Artificial Sequence: Synthetic oligonucleotide
  source 1..21: mol_type = other RNA
  modified_base 1: mod_base = OTHER; note = 2'-O-methylcytidine-3'-phosphorothioate
  modified_base 2: mod_base = OTHER; note = 2'-O-methyladenosine-3'-phosphorothioate
  modified_base 3: mod_base = OTHER; note = 2'-O-methylcytidine-3'-phosphate
  modified_base 4: mod_base = OTHER; note = 2'-O-methylcytidine-3'-phosphate
  modified_base 5: mod_base = OTHER; note = 2'-O-methyluridine-3'-phosphate
  modified_base 6: mod_base = OTHER; note = 2'-O-methylguanosine-3'-phosphate
  modified_base 7: mod_base = OTHER; note = 2'-fluorocytidine-3'-phosphate
  modified_base 8: mod_base = OTHER; note = 2'-O-methylcytidine-3'-phosphate
  modified_base 9: mod_base = OTHER; note = 2'-fluoroadenosine-3'-phosphate
  modified_base 10: mod_base = OTHER; note = 2'-fluoroadenosine-3'-phosphate
  modified_base 11: mod_base = OTHER; note = 2'-fluoroguanosine-3'-phosphate
  modified_base 12: mod_base = OTHER; note = 2'-O-methyluridine-3'-phosphate
  modified_base 13: mod_base = OTHER; note = 2'-O-methylguanosine-3'-phosphate
  modified_base 14: mod_base = OTHER; note = 2'-O-methyladenosine-3'-phosphate
  modified_base 15: mod_base = OTHER; note = 2'-O-methyladenosine-3'-phosphate
  modified_base 16: mod_base = OTHER; note = 2'-O-methyluridine-3'-phosphate
  modified_base 17: mod_base = OTHER; note = 2'-O-methylguanosine-3'-phosphate
  modified_base 18: mod_base = OTHER; note = 2'-O-methylguanosine-3'-phosphate
  modified_base 19: mod_base = OTHER; note = 2'-O-methylcytidine-3'-phosphate
  modified_base 20: mod_base = OTHER; note = 2'-O-methylcytidine-3'-phosphate
  modified_base 21: mod_base = OTHER; note = 2'-O-methyluridine-3'-phosphate N-[tris(GalNAc-alkyl)-amidodecanoyl)]-4-hydroxyprolinol (Hyp-(GalNAc-alkyl)3)
cacctgccaagtgaatggcct

SEQ ID NO: 1233 - RNA, 21 nt, synthetic construct
  misc_feature 1..21: note = Description of Artificial Sequence: Synthetic oligonucleotide
  source 1..21: mol_type = other RNA
  modified_base 1: mod_base = OTHER; note = 2'-O-methylcytidine-3'-phosphorothioate
  modified_base 2: mod_base = OTHER; note = 2'-O-methyladenosine-3'-phosphorothioate
  modified_base 3: mod_base = OTHER; note = 2'-O-methyluridine-3'-phosphate
  modified_base 4: mod_base = OTHER; note = 2'-O-methyluridine-3'-phosphate
  modified_base 5: mod_base = OTHER; note = 2'-O-methylguanosine-3'-phosphate
  modified_base 6: mod_base = OTHER; note = 2'-O-methylguanosine-3'-phosphate
  modified_base 7: mod_base = OTHER; note = 2'-fluorocytidine-3'-phosphate
  modified_base 8: mod_base = OTHER; note = 2'-O-methyladenosine-3'-phosphate
  modified_base 9: mod_base = OTHER; note = 2'-fluorocytidine-3'-phosphate
  modified_base 10: mod_base = OTHER; note = 2'-fluoroadenosine-3'-phosphate
  modified_base 11: mod_base = OTHER; note = 2'-fluoroadenosine-3'-phosphate
  modified_base 12: mod_base = OTHER; note = 2'-O-methylguanosine-3'-phosphate
  modified_base 13: mod_base = OTHER; note = 2'-O-methylguanosine-3'-phosphate
  modified_base 14: mod_base = OTHER; note = 2'-O-methyladenosine-3'-phosphate
  modified_base 15: mod_base = OTHER; note = 2'-O-methyladenosine-3'-phosphate
  modified_base 16: mod_base = OTHER; note = 2'-O-methylguanosine-3'-phosphate
  modified_base 17: mod_base = OTHER; note = 2'-O-methylguanosine-3'-phosphate
  modified_base 18: mod_base = OTHER; note = 2'-O-methyluridine-3'-phosphate
  modified_base 19: mod_base = OTHER; note = 2'-O-methylguanosine-3'-phosphate
  modified_base 20: mod_base = OTHER; note = 2'-O-methylguanosine-3'-phosphate
  modified_base 21: mod_base = OTHER; note = 2'-O-methyluridine-3'-phosphate N-[tris(GalNAc-alkyl)-amidodecanoyl)]-4-hydroxyprolinol (Hyp-(GalNAc-alkyl)3)
cattggcacaaggaaggtggt

SEQ ID NO: 1234 - RNA, 21 nt, synthetic construct
  misc_feature 1..21: note = Description of Artificial Sequence: Synthetic oligonucleotide
  source 1..21: mol_type = other RNA
  modified_base 1: mod_base = OTHER; note = 2'-O-methylcytidine-3'-phosphorothioate
  modified_base 2: mod_base = OTHER; note = 2'-O-methylguanosine-3'-phosphorothioate
  modified_base 3: mod_base = OTHER; note = 2'-O-methylcytidine-3'-phosphate
  modified_base 4: mod_base = OTHER; note = 2'-O-methylcytidine-3'-phosphate
  modified_base 5: mod_base = OTHER; note = 2'-O-methyluridine-3'-phosphate
  modified_base 6: mod_base = OTHER; note = 2'-O-methyluridine-3'-phosphate
  modified_base 7: mod_base = OTHER; note = 2'-fluoroguanosine-3'-phosphate
  modified_base 8: mod_base = OTHER; note = 2'-O-methyladenosine-3'-phosphate
  modified_base 9: mod_base = OTHER; note = 2'-fluoroadenosine-3'-phosphate
  modified_base 10: mod_base = OTHER; note = 2'-fluoroguanosine-3'-phosphate
  modified_base 11: mod_base = OTHER; note = 2'-fluoroadenosine-3'-phosphate
  modified_base 12: mod_base = OTHER; note = 2'-O-methylcytidine-3'-phosphate
  modified_base 13: mod_base = OTHER; note = 2'-O-methyladenosine-3'-phosphate
  modified_base 14: mod_base = OTHER; note = 2'-O-methylguanosine-3'-phosphate
  modified_base 15: mod_base = OTHER; note = 2'-O-methylcytidine-3'-phosphate
  modified_base 16: mod_base = OTHER; note = 2'-O-methylguanosine-3'-phosphate
  modified_base 17: mod_base = OTHER; note = 2'-O-methyluridine-3'-phosphate
  modified_base 18: mod_base = OTHER; note = 2'-O-methylcytidine-3'-phosphate
  modified_base 19: mod_base = OTHER; note = 2'-O-methyladenosine-3'-phosphate
  modified_base 20: mod_base = OTHER; note = 2'-O-methylcytidine-3'-phosphate
  modified_base 21: mod_base = OTHER; note = 2'-O-methyluridine-3'-phosphate N-[tris(GalNAc-alkyl)-amidodecanoyl)]-4-hydroxyprolinol (Hyp-(GalNAc-alkyl)3)
cgccttgaagacagcgtcact

SEQ ID NO: 1235 - RNA, 21 nt, synthetic construct
  misc_feature 1..21: note = Description of Artificial Sequence: Synthetic oligonucleotide
  source 1..21: mol_type = other RNA
  modified_base 1: mod_base = OTHER; note = 2'-O-methylguanosine-3'-phosphorothioate
  modified_base 2: mod_base = OTHER; note = 2'-O-methylguanosine-3'-phosphorothioate
  modified_base 3: mod_base = OTHER; note = 2'-O-methylcytidine-3'-phosphate
  modified_base 4: mod_base = OTHER; note = 2'-O-methylguanosine-3'-phosphate
  modified_base 5: mod_base = OTHER; note = 2'-O-methyladenosine-3'-phosphate
  modified_base 6: mod_base = OTHER; note = 2'-O-methyladenosine-3'-phosphate
  modified_base 7: mod_base = OTHER; note = 2'-fluorocytidine-3'-phosphate
  modified_base 8: mod_base = OTHER; note = 2'-O-methylguanosine-3'-phosphate
  modified_base 9: mod_base = OTHER; note = 2'-fluorouridine-3'-phosphate
  modified_base 10: mod_base = OTHER; note = 2'-fluoroguanosine-3'-phosphate
  modified_base 11: mod_base = OTHER; note = 2'-fluorouridine-3'-phosphate
  modified_base 12: mod_base = OTHER; note = 2'-O-methylcytidine-3'-phosphate
  modified_base 13: mod_base = OTHER; note = 2'-O-methyladenosine-3'-phosphate
  modified_base 14: mod_base = OTHER; note = 2'-O-methylguanosine-3'-phosphate
  modified_base 15: mod_base = OTHER; note = 2'-O-methylguanosine-3'-phosphate
  modified_base 16: mod_base = OTHER; note = 2'-O-methyladenosine-3'-phosphate
  modified_base 17: mod_base = OTHER; note = 2'-O-methyladenosine-3'-phosphate
  modified_base 18: mod_base = OTHER; note = 2'-O-methylguanosine-3'-phosphate
  modified_base 19: mod_base = OTHER; note = 2'-O-methylguanosine-3'-phosphate
  modified_base 20: mod_base = OTHER; note = 2'-O-methyluridine-3'-phosphate
  modified_base 21: mod_base = OTHER; note = 2'-O-methyluridine-3'-phosphate N-[tris(GalNAc-alkyl)-amidodecanoyl)]-4-hydroxyprolinol (Hyp-(GalNAc-alkyl)3)
ggcgaacgtgtcaggaaggtt

SEQ ID NO: 1236 - RNA, 21 nt, synthetic construct
  misc_feature 1..21: note = Description of Artificial Sequence: Synthetic oligonucleotide
  source 1..21: mol_type = other RNA
  modified_base 1: mod_base = OTHER; note = 2'-O-methylcytidine-3'-phosphorothioate
  modified_base 2: mod_base = OTHER; note = 2'-O-methyluridine-3'-phosphorothioate
  modified_base 3: mod_base = OTHER; note = 2'-O-methylguanosine-3'-phosphate
  modified_base 4: mod_base = OTHER; note = 2'-O-methylcytidine-3'-phosphate
  modified_base 5: mod_base = OTHER; note = 2'-O-methylcytidine-3'-phosphate
  modified_base 6: mod_base = OTHER; note = 2'-O-methyladenosine-3'-phosphate
  modified_base 7: mod_base = OTHER; note = 2'-fluoroadenosine-3'-phosphate
  modified_base 8: mod_base = OTHER; note = 2'-O-methylguanosine-3'-phosphate
  modified_base 9: mod_base = OTHER; note = 2'-fluoroadenosine-3'-phosphate
  modified_base 10: mod_base = OTHER; note = 2'-fluorocytidine-3'-phosphate
  modified_base 11: mod_base = OTHER; note = 2'-fluorouridine-3'-phosphate
  modified_base 12: mod_base = OTHER; note = 2'-O-methylcytidine-3'-phosphate
  modified_base 13: mod_base = OTHER; note = 2'-O-methylcytidine-3'-phosphate
  modified_base 14: mod_base = OTHER; note = 2'-O-methyluridine-3'-phosphate
  modified_base 15: mod_base = OTHER; note = 2'-O-methyluridine-3'-phosphate
  modified_base 16: mod_base = OTHER; note = 2'-O-methylcytidine-3'-phosphate
  modified_base 17: mod_base = OTHER; note = 2'-O-methyladenosine-3'-phosphate
  modified_base 18: mod_base = OTHER; note = 2'-O-methyluridine-3'-phosphate
  modified_base 19: mod_base = OTHER; note = 2'-O-methylguanosine-3'-phosphate
  modified_base 20: mod_base = OTHER; note = 2'-O-methyluridine-3'-phosphate
  modified_base 21: mod_base = OTHER; note = 2'-O-methyluridine-3'-phosphate N-[tris(GalNAc-alkyl)-amidodecanoyl)]-4-hydroxyprolinol (Hyp-(GalNAc-alkyl)3)
ctgccaagactccttcatgtt

SEQ ID NO: 1237 - RNA, 21 nt, synthetic construct
  misc_feature 1..21: note = Description of Artificial Sequence: Synthetic oligonucleotide
  source 1..21: mol_type = other RNA
  modified_base 1: mod_base = OTHER; note = 2'-O-methylguanosine-3'-phosphorothioate
  modified_base 2: mod_base = OTHER; note = 2'-O-methylcytidine-3'-phosphorothioate
  modified_base 3: mod_base = OTHER; note = 2'-O-methylcytidine-3'-phosphate
  modified_base 4: mod_base = OTHER; note = 2'-O-methylguanosine-3'-phosphate
  modified_base 5: mod_base = OTHER; note = 2'-O-methyladenosine-3'-phosphate
  modified_base 6: mod_base = OTHER; note = 2'-O-methyladenosine-3'-phosphate
  modified_base 7: mod_base = OTHER; note = 2'-fluoroguanosine-3'-phosphate
  modified_base 8: mod_base = OTHER; note = 2'-O-methylcytidine-3'-phosphate
  modified_base 9: mod_base = OTHER; note = 2'-fluorouridine-3'-phosphate
  modified_base 10: mod_base = OTHER; note = 2'-fluorouridine-3'-phosphate
  modified_base 11: mod_base = OTHER; note = 2'-fluorouridine-3'-phosphate
  modified_base 12: mod_base = OTHER; note = 2'-O-methylcytidine-3'-phosphate
  modified_base 13: mod_base = OTHER; note = 2'-O-methylcytidine-3'-phosphate
  modified_base 14: mod_base = OTHER; note = 2'-O-methyluridine-3'-phosphate
  modified_base 15: mod_base = OTHER; note = 2'-O-methylguanosine-3'-phosphate
  modified_base 16: mod_base = OTHER; note = 2'-O-methyluridine-3'-phosphate
  modified_base 17: mod_base = OTHER; note = 2'-O-methylcytidine-3'-phosphate
  modified_base 18: mod_base = OTHER; note = 2'-O-methyluridine-3'-phosphate
  modified_base 19: mod_base = OTHER; note = 2'-O-methyluridine-3'-phosphate
  modified_base 20: mod_base = OTHER; note = 2'-O-methylcytidine-3'-phosphate
  modified_base 21: mod_base = OTHER; note = 2'-O-methyluridine-3'-phosphate N-[tris(GalNAc-alkyl)-amidodecanoyl)]-4-hydroxyprolinol (Hyp-(GalNAc-alkyl)3)
gccgaagctttcctgtcttct

SEQ ID NO: 1238 - RNA, 21 nt, synthetic construct
  misc_feature 1..21: note = Description of Artificial Sequence: Synthetic oligonucleotide
  source 1..21: mol_type = other RNA
  modified_base 1: mod_base = OTHER; note = 2'-O-methyluridine-3'-phosphorothioate
  modified_base 2: mod_base = OTHER; note = 2'-O-methyluridine-3'-phosphorothioate
  modified_base 3: mod_base = OTHER; note = 2'-O-methylcytidine-3'-phosphate
  modified_base 4: mod_base = OTHER; note = 2'-O-methylcytidine-3'-phosphate
  modified_base 5: mod_base = OTHER; note = 2'-O-methylcytidine-3'-phosphate
  modified_base 6: mod_base = OTHER; note = 2'-O-methyluridine-3'-phosphate
  modified_base 7: mod_base = OTHER; note = 2'-fluoroguanosine-3'-phosphate
  modified_base 8: mod_base = OTHER; note = 2'-O-methyladenosine-3'-phosphate
  modified_base 9: mod_base = OTHER; note = 2'-fluorocytidine-3'-phosphate
  modified_base 10: mod_base = OTHER; note = 2'-fluoroadenosine-3'-phosphate
  modified_base 11: mod_base = OTHER; note = 2'-fluoroguanosine-3'-phosphate
  modified_base 12: mod_base = OTHER; note = 2'-O-methyladenosine-3'-phosphate
  modified_base 13: mod_base = OTHER; note = 2'-O-methylguanosine-3'-phosphate
  modified_base 14: mod_base = OTHER; note = 2'-O-methyladenosine-3'-phosphate
  modified_base 15: mod_base = OTHER; note = 2'-O-methylcytidine-3'-phosphate
  modified_base 16: mod_base = OTHER; note = 2'-O-methylcytidine-3'-phosphate
  modified_base 17: mod_base = OTHER; note = 2'-O-methyladenosine-3'-phosphate
  modified_base 18: mod_base = OTHER; note = 2'-O-methyluridine-3'-phosphate
  modified_base 19: mod_base = OTHER; note = 2'-O-methyladenosine-3'-phosphate
  modified_base 20: mod_base = OTHER; note = 2'-O-methylguanosine-3'-phosphate
  modified_base 21: mod_base = OTHER; note = 2'-O-methyluridine-3'-phosphate N-[tris(GalNAc-alkyl)-amidodecanoyl)]-4-hydroxyprolinol (Hyp-(GalNAc-alkyl)3)
ttccctgacagagaccatagt

SEQ ID NO: 1239 - RNA, 21 nt, synthetic construct
  misc_feature 1..21: note = Description of Artificial Sequence: Synthetic oligonucleotide
  source 1..21: mol_type = other RNA
  modified_base 1: mod_base = OTHER; note = 2'-O-methylguanosine-3'-phosphorothioate
  modified_base 2: mod_base = OTHER; note = 2'-O-methylguanosine-3'-phosphorothioate
  modified_base 3: mod_base = OTHER; note = 2'-O-methyladenosine-3'-phosphate
  modified_base 4: mod_base = OTHER; note = 2'-O-methylguanosine-3'-phosphate
  modified_base 5: mod_base = OTHER; note = 2'-O-methyluridine-3'-phosphate
  modified_base 6: mod_base = OTHER; note = 2'-O-methylcytidine-3'-phosphate
  modified_base 7: mod_base = OTHER; note = 2'-fluoroguanosine-3'-phosphate
  modified_base 8: mod_base = OTHER; note = 2'-O-methyladenosine-3'-phosphate
  modified_base 9: mod_base = OTHER; note = 2'-fluorouridine-3'-phosphate
  modified_base 10: mod_base = OTHER; note = 2'-fluoroguanosine-3'-phosphate
  modified_base 11: mod_base = OTHER; note = 2'-fluorocytidine-3'-phosphate
  modified_base 12: mod_base = OTHER; note = 2'-O-methyluridine-3'-phosphate
  modified_base 13: mod_base = OTHER; note = 2'-O-methylguanosine-3'-phosphate
  modified_base 14: mod_base = OTHER; note = 2'-O-methyladenosine-3'-phosphate
  modified_base 15: mod_base = OTHER; note = 2'-O-methylguanosine-3'-phosphate
  modified_base 16: mod_base = OTHER; note = 2'-O-methylguanosine-3'-phosphate
  modified_base 17: mod_base = OTHER; note = 2'-O-methyladenosine-3'-phosphate
  modified_base 18: mod_base = OTHER; note = 2'-O-methyluridine-3'-phosphate
  modified_base 19: mod_base = OTHER; note = 2'-O-methylguanosine-3'-phosphate
  modified_base 20: mod_base = OTHER; note = 2'-O-methylguanosine-3'-phosphate
  modified_base 21: mod_base = OTHER; note = 2'-O-methyluridine-3'-phosphate N-[tris(GalNAc-alkyl)-amidodecanoyl)]-4-hydroxyprolinol (Hyp-(GalNAc-alkyl)3)
ggagtcgatgctgaggatggt

SEQ ID NO: 1240 - RNA, 21 nt, synthetic construct
  misc_feature 1..21: note = Description of Artificial Sequence: Synthetic oligonucleotide
  source 1..21: mol_type = other RNA
  modified_base 1: mod_base = OTHER; note = 2'-O-methylcytidine-3'-phosphorothioate
  modified_base 2: mod_base = OTHER; note = 2'-O-methyladenosine-3'-phosphorothioate
  modified_base 3: mod_base = OTHER; note = 2'-O-methyladenosine-3'-phosphate
  modified_base 4: mod_base = OTHER; note = 2'-O-methylcytidine-3'-phosphate
  modified_base 5: mod_base = OTHER; note = 2'-O-methyladenosine-3'-phosphate
  modified_base 6: mod_base = OTHER; note = 2'-O-methylguanosine-3'-phosphate
  modified_base 7: mod_base = OTHER; note = 2'-fluoroadenosine-3'-phosphate
  modified_base 8: mod_base = OTHER; note = 2'-O-methyladenosine-3'-phosphate
  modified_base 9: mod_base = OTHER; note = 2'-fluoroguanosine-3'-phosphate
  modified_base 10: mod_base = OTHER; note = 2'-fluorocytidine-3'-phosphate
  modified_base 11: mod_base = OTHER; note = 2'-fluoroguanosine-3'-phosphate
  modified_base 12: mod_base = OTHER; note = 2'-O-methylguanosine-3'-phosphate
  modified_base 13: mod_base = OTHER; note = 2'-O-methyladenosine-3'-phosphate
  modified_base 14: mod_base = OTHER; note = 2'-O-methyladenosine-3'-phosphate
  modified_base 15: mod_base = OTHER; note = 2'-O-methylguanosine-3'-phosphate
  modified_base 16: mod_base = OTHER; note = 2'-O-methyladenosine-3'-phosphate
  modified_base 17: mod_base = OTHER; note = 2'-O-methyluridine-3'-phosphate
  modified_base 18: mod_base = OTHER; note = 2'-O-methylcytidine-3'-phosphate
  modified_base 19: mod_base = OTHER; note = 2'-O-methylguanosine-3'-phosphate
  modified_base 20: mod_base = OTHER; note = 2'-O-methyluridine-3'-phosphate
  modified_base 21: mod_base = OTHER; note = 2'-O-methyluridine-3'-phosphate N-[tris(GalNAc-alkyl)-amidodecanoyl)]-4-hydroxyprolinol (Hyp-(GalNAc-alkyl)3)
caacagaagcggaagatcgtt

SEQ ID NO: 1241 - RNA, 21 nt, synthetic construct
  misc_feature 1..21: note = Description of Artificial Sequence: Synthetic oligonucleotide
  source 1..21: mol_type = other RNA
  modified_base 1: mod_base = OTHER; note = 2'-O-methyluridine-3'-phosphorothioate
  modified_base 2: mod_base = OTHER; note = 2'-O-methyladenosine-3'-phosphorothioate
  modified_base 3: mod_base = OTHER; note = 2'-O-methylguanosine-3'-phosphate
  modified_base 4: mod_base = OTHER; note = 2'-O-methyladenosine-3'-phosphate
  modified_base 5: mod_base = OTHER; note = 2'-O-methyluridine-3'-phosphate
  modified_base 6: mod_base = OTHER; note = 2'-O-methylguanosine-3'-phosphate
  modified_base 7: mod_base = OTHER; note = 2'-fluoroguanosine-3'-phosphate
  modified_base 8: mod_base = OTHER; note = 2'-O-methyladenosine-3'-phosphate
  modified_base 9: mod_base = OTHER; note = 2'-fluorouridine-3'-phosphate
  modified_base 10: mod_base = OTHER; note = 2'-fluorocytidine-3'-phosphate
  modified_base 11: mod_base = OTHER; note = 2'-fluoroadenosine-3'-phosphate
  modified_base 12: mod_base = OTHER; note = 2'-O-methylguanosine-3'-phosphate
  modified_base 13: mod_base = OTHER; note = 2'-O-methyladenosine-3'-phosphate
  modified_base 14: mod_base = OTHER; note = 2'-O-methylcytidine-3'-phosphate
  modified_base 15: mod_base = OTHER; note = 2'-O-methyladenosine-3'-phosphate
  modified_base 16: mod_base = OTHER; note = 2'-O-methylguanosine-3'-phosphate
  modified_base 17: mod_base = OTHER; note = 2'-O-methylcytidine-3'-phosphate
  modified_base 18: mod_base = OTHER; note = 2'-O-methyladenosine-3'-phosphate
  modified_base 19: mod_base = OTHER; note = 2'-O-methyluridine-3'-phosphate
  modified_base 20: mod_base = OTHER; note = 2'-O-methyluridine-3'-phosphate
  modified_base 21: mod_base = OTHER; note = 2'-O-methyluridine-3'-phosphate N-[tris(GalNAc-alkyl)-amidodecanoyl)]-4-hydroxyprolinol (Hyp-(GalNAc-alkyl)3)
tagatggatcagacagcattt

SEQ ID NO: 1242 - RNA, 21 nt, synthetic construct
  misc_feature 1..21: note = Description of Artificial Sequence: Synthetic oligonucleotide
  source 1..21: mol_type = other RNA
  modified_base 1: mod_base = OTHER; note = 2'-O-methylguanosine-3'-phosphorothioate
  modified_base 2: mod_base = OTHER; note = 2'-O-methylcytidine-3'-phosphorothioate
  modified_base 3: mod_base = OTHER; note = 2'-O-methylcytidine-3'-phosphate
  modified_base 4: mod_base = OTHER; note = 2'-O-methyladenosine-3'-phosphate
  modified_base 5: mod_base = OTHER; note = 2'-O-methylguanosine-3'-phosphate
  modified_base 6: mod_base = OTHER; note = 2'-O-methylcytidine-3'-phosphate
  modified_base 7: mod_base = OTHER; note = 2'-fluoroadenosine-3'-phosphate
  modified_base 8: mod_base = OTHER; note = 2'-O-methyladenosine-3'-phosphate
  modified_base 9: mod_base = OTHER; note = 2'-fluorocytidine-3'-phosphate
  modified_base 10: mod_base = OTHER; note = 2'-fluorouridine-3'-phosphate
  modified_base 11: mod_base = OTHER; note = 2'-fluorouridine-3'-phosphate
  modified_base 12: mod_base = OTHER; note = 2'-O-methylcytidine-3'-phosphate
  modified_base 13: mod_base = OTHER; note = 2'-O-methyladenosine-3'-phosphate
  modified_base 14: mod_base = OTHER; note = 2'-O-methylcytidine-3'-phosphate
  modified_base 15: mod_base = OTHER; note = 2'-O-methyladenosine-3'-phosphate
  modified_base 16: mod_base = OTHER; note = 2'-O-methylguanosine-3'-phosphate
  modified_base 17: mod_base = OTHER; note = 2'-O-methylguanosine-3'-phosphate
  modified_base 18: mod_base = OTHER; note = 2'-O-methyladenosine-3'-phosphate
  modified_base 19: mod_base = OTHER; note = 2'-O-methylguanosine-3'-phosphate
  modified_base 20: mod_base = OTHER; note = 2'-O-methylcytidine-3'-phosphate
  modified_base 21: mod_base = OTHER; note = 2'-O-methyluridine-3'-phosphate N-[tris(GalNAc-alkyl)-amidodecanoyl)]-4-hydroxyprolinol (Hyp-(GalNAc-alkyl)3)
gccagcaacttcacaggagct

SEQ ID NO: 1243 - RNA, 21 nt, synthetic construct
  misc_feature 1..21: note = Description of Artificial Sequence: Synthetic oligonucleotide
  source 1..21: mol_type = other RNA
  modified_base 1: mod_base = OTHER; note = 2'-O-methyladenosine-3'-phosphorothioate
  modified_base 2: mod_base = OTHER; note = 2'-O-methyluridine-3'-phosphorothioate
  modified_base 3: mod_base = OTHER; note = 2'-O-methyluridine-3'-phosphate
  modified_base 4: mod_base = OTHER; note = 2'-O-methylguanosine-3'-phosphate
  modified_base 5: mod_base = OTHER; note = 2'-O-methyladenosine-3'-phosphate
  modified_base 6: mod_base = OTHER; note = 2'-O-methylguanosine-3'-phosphate
  modified_base 7: mod_base = OTHER; note = 2'-fluoroadenosine-3'-phosphate
  modified_base 8: mod_base = OTHER; note = 2'-O-methyladenosine-3'-phosphate
  modified_base 9: mod_base = OTHER; note = 2'-fluoroguanosine-3'-phosphate
  modified_base 10: mod_base = OTHER; note = 2'-fluoroguanosine-3'-phosphate
  modified_base 11: mod_base = OTHER; note = 2'-fluorouridine-3'-phosphate
  modified_base 12: mod_base = OTHER; note = 2'-O-methylguanosine-3'-phosphate
  modified_base 13: mod_base = OTHER; note = 2'-O-methylguanosine-3'-phosphate
  modified_base 14: mod_base = OTHER; note = 2'-O-methylcytidine-3'-phosphate
  modified_base 15: mod_base = OTHER; note = 2'-O-methyladenosine-3'-phosphate
  modified_base 16: mod_base = OTHER; note = 2'-O-methyladenosine-3'-phosphate
  modified_base 17: mod_base = OTHER; note = 2'-O-methylguanosine-3'-phosphate
  modified_base 18: mod_base = OTHER; note = 2'-O-methyluridine-3'-phosphate
  modified_base 19: mod_base = OTHER; note = 2'-O-methyluridine-3'-phosphate
  modified_base 20: mod_base = OTHER; note = 2'-O-methyladenosine-3'-phosphate
  modified_base 21: mod_base = OTHER; note = 2'-O-methyluridine-3'-phosphate N-[tris(GalNAc-alkyl)-amidodecanoyl)]-4-hydroxyprolinol (Hyp-(GalNAc-alkyl)3)
attgagaaggtggcaagttat

SEQ ID NO: 1244 - RNA, 21 nt, synthetic construct
  misc_feature 1..21: note = Description of Artificial Sequence: Synthetic oligonucleotide
  source 1..21: mol_type = other RNA
  modified_base 1: mod_base = OTHER; note = 2'-O-methyladenosine-3'-phosphorothioate
  modified_base 2: mod_base = OTHER; note = 2'-O-methyluridine-3'-phosphorothioate
  modified_base 3: mod_base = OTHER; note = 2'-O-methyluridine-3'-phosphate
  modified_base 4: mod_base = OTHER; note = 2'-O-methyluridine-3'-phosphate
  modified_base 5: mod_base = OTHER; note = 2'-O-methylguanosine-3'-phosphate
  modified_base 6: mod_base = OTHER; note = 2'-O-methylguanosine-3'-phosphate
  modified_base 7: mod_base = OTHER; note = 2'-fluoroguanosine-3'-phosphate
  modified_base 8: mod_base = OTHER; note = 2'-O-methyluridine-3'-phosphate
  modified_base 9: mod_base = OTHER; note = 2'-fluorocytidine-3'-phosphate
  modified_base 10: mod_base = OTHER; note = 2'-fluoroadenosine-3'-phosphate
  modified_base 11: mod_base = OTHER; note = 2'-fluoroadenosine-3'-phosphate
  modified_base 12: mod_base = OTHER; note = 2'-O-methyladenosine-3'-phosphate
  modified_base 13: mod_base = OTHER; note = 2'-O-methylguanosine-3'-phosphate
  modified_base 14: mod_base = OTHER; note = 2'-O-methyluridine-3'-phosphate
  modified_base 15: mod_base = OTHER; note = 2'-O-methylguanosine-3'-phosphate
  modified_base 16: mod_base = OTHER; note = 2'-O-methyluridine-3'-phosphate
  modified_base 17: mod_base = OTHER; note = 2'-O-methylcytidine-3'-phosphate
  modified_base 18: mod_base = OTHER; note = 2'-O-methyluridine-3'-phosphate
  modified_base 19: mod_base = OTHER; note = 2'-O-methylguanosine-3'-phosphate
  modified_base 20: mod_base = OTHER; note = 2'-O-methyladenosine-3'-phosphate
  modified_base 21: mod_base = OTHER; note = 2'-O-methyluridine-3'-phosphate N-[tris(GalNAc-alkyl)-amidodecanoyl)]-4-hydroxyprolinol (Hyp-(GalNAc-alkyl)3)
atttgggtcaaagtgtctgat

SEQ ID NO: 1245 - RNA, 21 nt, synthetic construct
  misc_feature 1..21: note = Description of Artificial Sequence: Synthetic oligonucleotide
  source 1..21: mol_type = other RNA
  modified_base 1: mod_base = OTHER; note = 2'-O-methyladenosine-3'-phosphorothioate
  modified_base 2: mod_base = OTHER; note = 2'-O-methylguanosine-3'-phosphorothioate
  modified_base 3: mod_base = OTHER; note = 2'-O-methyladenosine-3'-phosphate
  modified_base 4: mod_base = OTHER; note = 2'-O-methylcytidine-3'-phosphate
  modified_base 5: mod_base = OTHER; note = 2'-O-methyladenosine-3'-phosphate
  modified_base 6: mod_base = OTHER; note = 2'-O-methylguanosine-3'-phosphate
  modified_base 7: mod_base = OTHER; note = 2'-fluorocytidine-3'-phosphate
  modified_base 8: mod_base = OTHER; note = 2'-O-methyladenosine-3'-phosphate
  modified_base 9: mod_base = OTHER; note = 2'-fluoroguanosine-3'-phosphate
  modified_base 10: mod_base = OTHER; note = 2'-fluorouridine-3'-phosphate
  modified_base 11: mod_base = OTHER; note = 2'-fluoroadenosine-3'-phosphate
  modified_base 12: mod_base = OTHER; note = 2'-O-methyladenosine-3'-phosphate
  modified_base 13: mod_base = OTHER; note = 2'-O-methyluridine-3'-phosphate
  modified_base 14: mod_base = OTHER; note = 2'-O-methylguanosine-3'-phosphate
  modified_base 15: mod_base = OTHER; note = 2'-O-methylcytidine-3'-phosphate
  modified_base 16: mod_base = OTHER; note = 2'-O-methyladenosine-3'-phosphate
  modified_base 17: mod_base = OTHER; note = 2'-O-methylguanosine-3'-phosphate
  modified_base 18: mod_base = OTHER; note = 2'-O-methyladenosine-3'-phosphate
  modified_base 19: mod_base = OTHER; note = 2'-O-methylcytidine-3'-phosphate
  modified_base 20: mod_base = OTHER; note = 2'-O-methyluridine-3'-phosphate
  modified_base 21: mod_base = OTHER; note = 2'-O-methyluridine-3'-phosphate N-[tris(GalNAc-alkyl)-amidodecanoyl)]-4-hydroxyprolinol (Hyp-(GalNAc-alkyl)3)
agacagcagtaatgcagactt

SEQ ID NO: 1246 - RNA, 21 nt, synthetic construct
  misc_feature 1..21: note = Description of Artificial Sequence: Synthetic oligonucleotide
  source 1..21: mol_type = other RNA
  modified_base 1: mod_base = OTHER; note = 2'-O-methylguanosine-3'-phosphorothioate
  modified_base 2: mod_base = OTHER; note = 2'-O-methyladenosine-3'-phosphorothioate
  modified_base 3: mod_base = OTHER; note = 2'-O-methyladenosine-3'-phosphate
  modified_base 4: mod_base = OTHER; note = 2'-O-methylguanosine-3'-phosphate
  modified_base 5: mod_base = OTHER; note = 2'-O-methyladenosine-3'-phosphate
  modified_base 6: mod_base = OTHER; note = 2'-O-methylcytidine-3'-phosphate
  modified_base 7: mod_base = OTHER; note = 2'-fluorocytidine-3'-phosphate
  modified_base 8: mod_base = OTHER; note = 2'-O-methyladenosine-3'-phosphate
  modified_base 9: mod_base = OTHER; note = 2'-fluorocytidine-3'-phosphate
  modified_base 10: mod_base = OTHER; note = 2'-fluoroadenosine-3'-phosphate
  modified_base 11: mod_base = OTHER; note = 2'-fluoroadenosine-3'-phosphate
  modified_base 12: mod_base = OTHER; note = 2'-O-methylguanosine-3'-phosphate
  modified_base 13: mod_base = OTHER; note = 2'-O-methyluridine-3'-phosphate
  modified_base 14: mod_base = OTHER; note = 2'-O-methyluridine-3'-phosphate
  modified_base 15: mod_base = OTHER; note = 2'-O-methylguanosine-3'-phosphate
  modified_base 16: mod_base = OTHER; note = 2'-O-methyladenosine-3'-phosphate
  modified_base 17: mod_base = OTHER; note = 2'-O-methyladenosine-3'-phosphate
  modified_base 18: mod_base = OTHER; note = 2'-O-methylguanosine-3'-phosphate
  modified_base 19: mod_base = OTHER; note = 2'-O-methyluridine-3'-phosphate
  modified_base 20: mod_base = OTHER; note = 2'-O-methylcytidine-3'-phosphate
  modified_base 21: mod_base = OTHER; note = 2'-O-methyluridine-3'-phosphate N-[tris(GalNAc-alkyl)-amidodecanoyl)]-4-hydroxyprolinol (Hyp-(GalNAc-alkyl)3)
gaagaccacaagttgaagtct

SEQ ID NO: 1247 - RNA, 21 nt, synthetic construct
  misc_feature 1..21: note = Description of Artificial Sequence: Synthetic oligonucleotide
  source 1..21: mol_type = other RNA
  modified_base 1: mod_base = OTHER; note = 2'-O-methylguanosine-3'-phosphorothioate
  modified_base 2: mod_base = OTHER; note = 2'-O-methylguanosine-3'-phosphorothioate
  modified_base 3: mod_base = OTHER; note = 2'-O-methylguanosine-3'-phosphate
  modified_base 4: mod_base = OTHER; note = 2'-O-methyladenosine-3'-phosphate
  modified_base 5: mod_base = OTHER; note = 2'-O-methylcytidine-3'-phosphate
  modified_base 6: mod_base = OTHER; note = 2'-O-methyluridine-3'-phosphate
  modified_base 7: mod_base = OTHER; note = 2'-fluoroadenosine-3'-phosphate
  modified_base 8: mod_base = OTHER; note = 2'-O-methyladenosine-3'-phosphate
  modified_base 9: mod_base = OTHER; note = 2'-fluorocytidine-3'-phosphate
  modified_base 10: mod_base = OTHER; note = 2'-fluoroadenosine-3'-phosphate
  modified_base 11: mod_base = OTHER; note = 2'-fluorocytidine-3'-phosphate
  modified_base 12: mod_base = OTHER; note = 2'-O-methylcytidine-3'-phosphate
  modified_base 13: mod_base = OTHER; note = 2'-O-methyladenosine-3'-phosphate
  modified_base 14: mod_base = OTHER; note = 2'-O-methyladenosine-3'-phosphate
  modified_base 15: mod_base = OTHER; note = 2'-O-methylguanosine-3'-phosphate
  modified_base 16: mod_base = OTHER; note = 2'-O-methyladenosine-3'-phosphate
  modified_base 17: mod_base = OTHER; note = 2'-O-methyladenosine-3'-phosphate
  modified_base 18: mod_base = OTHER; note = 2'-O-methylguanosine-3'-phosphate
  modified_base 19: mod_base = OTHER; note = 2'-O-methylguanosine-3'-phosphate
  modified_base 20: mod_base = OTHER; note = 2'-O-methylcytidine-3'-phosphate
  modified_base 21: mod_base = OTHER; note = 2'-O-methyluridine-3'-phosphate N-[tris(GalNAc-alkyl)-amidodecanoyl)]-4-hydroxyprolinol (Hyp-(GalNAc-alkyl)3)
gggactaacaccaagaaggct

SEQ ID NO: 1248 - RNA, 21 nt, synthetic construct
  misc_feature 1..21: note = Description of Artificial Sequence: Synthetic oligonucleotide
  source 1..21: mol_type = other RNA
  modified_base 1: mod_base = OTHER; note = 2'-O-methylcytidine-3'-phosphorothioate
  modified_base 2: mod_base = OTHER; note = 2'-O-methyladenosine-3'-phosphorothioate
  modified_base 3: mod_base = OTHER; note = 2'-O-methylguanosine-3'-phosphate
  modified_base 4: mod_base = OTHER; note = 2'-O-methylguanosine-3'-phosphate
  modified_base 5: mod_base = OTHER; note = 2'-O-methylcytidine-3'-phosphate
  modified_base 6: mod_base = OTHER; note = 2'-O-methyladenosine-3'-phosphate
  modified_base 7: mod_base = OTHER; note = 2'-fluoroguanosine-3'-phosphate
  modified_base 8: mod_base = OTHER; note = 2'-O-methyluridine-3'-phosphate
  modified_base 9: mod_base = OTHER; note = 2'-fluoroguanosine-3'-phosphate
  modified_base 10: mod_base = OTHER; note = 2'-fluorouridine-3'-phosphate
  modified_base 11: mod_base = OTHER; note = 2'-fluoroadenosine-3'-phosphate
  modified_base 12: mod_base = OTHER; note = 2'-O-methylcytidine-3'-phosphate
  modified_base 13: mod_base = OTHER; note = 2'-O-methyladenosine-3'-phosphate
  modified_base 14: mod_base = OTHER; note = 2'-O-methylguanosine-3'-phosphate
  modified_base 15: mod_base = OTHER; note = 2'-O-methylcytidine-3'-phosphate
  modified_base 16: mod_base = OTHER; note = 2'-O-methyladenosine-3'-phosphate
  modified_base 17: mod_base = OTHER; note = 2'-O-methyluridine-3'-phosphate
  modified_base 18: mod_base = OTHER; note = 2'-O-methylguanosine-3'-phosphate
  modified_base 19: mod_base = OTHER; note = 2'-O-methyladenosine-3'-phosphate
  modified_base 20: mod_base = OTHER; note = 2'-O-methyluridine-3'-phosphate
  modified_base 21: mod_base = OTHER; note = 2'-O-methyluridine-3'-phosphate N-[tris(GalNAc-alkyl)-amidodecanoyl)]-4-hydroxyprolinol (Hyp-(GalNAc-alkyl)3)
caggcagtgtacagcatgatt

SEQ ID NO: 1249 - RNA, 21 nt, synthetic construct
  misc_feature 1..21: note = Description of Artificial Sequence: Synthetic oligonucleotide
  source 1..21: mol_type = other RNA
  modified_base 1: mod_base = OTHER; note = 2'-O-methylguanosine-3'-phosphorothioate
  modified_base 2: mod_base = OTHER; note = 2'-O-methylguanosine-3'-phosphorothioate
  modified_base 3: mod_base = OTHER; note = 2'-O-methylcytidine-3'-phosphate
  modified_base 4: mod_base = OTHER; note = 2'-O-methylcytidine-3'-phosphate
  modified_base 5: mod_base = OTHER; note = 2'-O-methyladenosine-3'-phosphate
  modified_base 6: mod_base = OTHER; note = 2'-O-methylguanosine-3'-phosphate
  modified_base 7: mod_base = OTHER; note = 2'-fluoroadenosine-3'-phosphate
  modified_base 8: mod_base = OTHER; note = 2'-O-methyluridine-3'-phosphate
  modified_base 9: mod_base = OTHER; note = 2'-fluoroguanosine-3'-phosphate
  modified_base 10: mod_base = OTHER; note = 2'-fluoroadenosine-3'-phosphate
  modified_base 11: mod_base = OTHER; note = 2'-fluorocytidine-3'-phosphate
  modified_base 12: mod_base = OTHER; note = 2'-O-methylguanosine-3'-phosphate
  modified_base 13: mod_base = OTHER; note = 2'-O-methyluridine-3'-phosphate
  modified_base 14: mod_base = OTHER; note = 2'-O-methylcytidine-3'-phosphate
  modified_base 15: mod_base = OTHER; note = 2'-O-methylcytidine-3'-phosphate
  modified_base 16: mod_base = OTHER; note = 2'-O-methylcytidine-3'-phosphate
  modified_base 17: mod_base = OTHER; note = 2'-O-methyluridine-3'-phosphate
  modified_base 18: mod_base = OTHER; note = 2'-O-methylcytidine-3'-phosphate
  modified_base 19: mod_base = OTHER; note = 2'-O-methylcytidine-3'-phosphate
  modified_base 20: mod_base = OTHER; note = 2'-O-methyluridine-3'-phosphate
  modified_base 21: mod_base = OTHER; note = 2'-O-methyluridine-3'-phosphate N-[tris(GalNAc-alkyl)-amidodecanoyl)]-4-hydroxyprolinol (Hyp-(GalNAc-alkyl)3)
ggccagatgacgtccctcctt

SEQ ID NO: 1250 - RNA, 21 nt, synthetic construct
  misc_feature 1..21: note = Description of Artificial Sequence: Synthetic oligonucleotide
  source 1..21: mol_type = other RNA
  modified_base 1: mod_base = OTHER; note = 2'-O-methyluridine-3'-phosphorothioate
  modified_base 2: mod_base = OTHER; note = 2'-O-methylguanosine-3'-phosphorothioate
  modified_base 3: mod_base = OTHER; note = 2'-O-methyluridine-3'-phosphate
  modified_base 4: mod_base = OTHER; note = 2'-O-methylcytidine-3'-phosphate
  modified_base 5: mod_base = OTHER; note = 2'-O-methyladenosine-3'-phosphate
  modified_base 6: mod_base = OTHER; note = 2'-O-methyluridine-3'-phosphate
  modified_base 7: mod_base = OTHER; note = 2'-fluorocytidine-3'-phosphate
  modified_base 8: mod_base = OTHER; note = 2'-O-methyladenosine-3'-phosphate
  modified_base 9: mod_base = OTHER; note = 2'-fluorouridine-3'-phosphate
  modified_base 10: mod_base = OTHER; note = 2'-fluorocytidine-3'-phosphate
  modified_base 11: mod_base = OTHER; note = 2'-fluorocytidine-3'-phosphate
  modified_base 12: mod_base = OTHER; note = 2'-O-methyluridine-3'-phosphate
  modified_base 13: mod_base = OTHER; note = 2'-O-methylcytidine-3'-phosphate
  modified_base 14: mod_base = OTHER; note = 2'-O-methyladenosine-3'-phosphate
  modified_base 15: mod_base = OTHER; note = 2'-O-methyluridine-3'-phosphate
  modified_base 16: mod_base = OTHER; note = 2'-O-methylguanosine-3'-phosphate
  modified_base 17: mod_base = OTHER; note = 2'-O-methyladenosine-3'-phosphate
  modified_base 18: mod_base = OTHER; note = 2'-O-methylcytidine-3'-phosphate
  modified_base 19: mod_base = OTHER; note = 2'-O-methyluridine-3'-phosphate
  modified_base 20: mod_base = OTHER; note = 2'-O-methylguanosine-3'-phosphate
  modified_base 21: mod_base = OTHER; note = 2'-O-methyluridine-3'-phosphate N-[tris(GalNAc-alkyl)-amidodecanoyl)]-4-hydroxyprolinol (Hyp-(GalNAc-alkyl)3)
tgtcatcatcctcatgactgt

SEQ ID NO: 1251 - RNA, 21 nt, synthetic construct
  misc_feature 1..21: note = Description of Artificial Sequence: Synthetic oligonucleotide
  source 1..21: mol_type = other RNA
  modified_base 1: mod_base = OTHER; note = 2'-O-methyladenosine-3'-phosphorothioate
  modified_base 2: mod_base = OTHER; note = 2'-O-methylcytidine-3'-phosphorothioate
  modified_base 3: mod_base = OTHER; note = 2'-O-methyluridine-3'-phosphate
  modified_base 4: mod_base = OTHER; note = 2'-O-methylguanosine-3'-phosphate
  modified_base 5: mod_base = OTHER; note = 2'-O-methyladenosine-3'-phosphate
  modified_base 6: mod_base = OTHER; note = 2'-O-methyluridine-3'-phosphate
  modified_base 7: mod_base = OTHER; note = 2'-fluoroguanosine-3'-phosphate
  modified_base 8: mod_base = OTHER; note = 2'-O-methylguanosine-3'-phosphate
  modified_base 9: mod_base = OTHER; note = 2'-fluoroadenosine-3'-phosphate
  modified_base 10: mod_base = OTHER; note = 2'-fluorouridine-3'-phosphate
  modified_base 11: mod_base = OTHER; note = 2'-fluorouridine-3'-phosphate
  modified_base 12: mod_base = OTHER; note = 2'-O-methylguanosine-3'-phosphate
  modified_base 13: mod_base = OTHER; note = 2'-O-methylcytidine-3'-phosphate
  modified_base 14: mod_base = OTHER; note = 2'-O-methyladenosine-3'-phosphate
  modified_base 15: mod_base = OTHER; note = 2'-O-methylcytidine-3'-phosphate
  modified_base 16: mod_base = OTHER; note = 2'-O-methyladenosine-3'-phosphate
  modified_base 17: mod_base = OTHER; note = 2'-O-methyladenosine-3'-phosphate
  modified_base 18: mod_base = OTHER; note = 2'-O-methylcytidine-3'-phosphate
  modified_base 19: mod_base = OTHER; note = 2'-O-methyladenosine-3'-phosphate
  modified_base 20: mod_base = OTHER; note = 2'-O-methyluridine-3'-phosphate
  modified_base 21: mod_base = OTHER; note = 2'-O-methyluridine-3'-phosphate N-[tris(GalNAc-alkyl)-amidodecanoyl)]-4-hydroxyprolinol (Hyp-(GalNAc-alkyl)3)
actgatggattgcacaacatt

SEQ ID NO: 1252 - RNA, 21 nt, synthetic construct
  misc_feature 1..21: note = Description of Artificial Sequence: Synthetic oligonucleotide
  source 1..21: mol_type = other RNA
  modified_base 1: mod_base = OTHER; note = 2'-O-methyluridine-3'-phosphorothioate
  modified_base 2: mod_base = OTHER; note = 2'-O-methyluridine-3'-phosphorothioate
  modified_base 3: mod_base = OTHER; note = 2'-O-methyladenosine-3'-phosphate
  modified_base 4: mod_base = OTHER; note = 2'-O-methylcytidine-3'-phosphate
  modified_base 5: mod_base = OTHER; note = 2'-O-methyluridine-3'-phosphate
  modified_base 6: mod_base = OTHER; note = 2'-O-methylguanosine-3'-phosphate
  modified_base 7: mod_base = OTHER; note = 2'-fluorouridine-3'-phosphate
  modified_base 8: mod_base = OTHER; note = 2'-O-methylcytidine-3'-phosphate
  modified_base 9: mod_base = OTHER; note = 2'-fluoroadenosine-3'-phosphate
  modified_base 10: mod_base = OTHER; note = 2'-fluorouridine-3'-phosphate
  modified_base 11: mod_base = OTHER; note = 2'-fluorouridine-3'-phosphate
  modified_base 12: mod_base = OTHER; note = 2'-O-methylguanosine-3'-phosphate
  modified_base 13: mod_base = OTHER; note = 2'-O-methyladenosine-3'-phosphate
  modified_base 14: mod_base = OTHER; note = 2'-O-methyluridine-3'-phosphate
  modified_base 15: mod_base = OTHER; note = 2'-O-methylguanosine-3'-phosphate
  modified_base 16: mod_base = OTHER; note = 2'-O-methyladenosine-3'-phosphate
  modified_base 17: mod_base = OTHER; note = 2'-O-methylguanosine-3'-phosphate
  modified_base 18: mod_base = OTHER; note = 2'-O-methyladenosine-3'-phosphate
  modified_base 19: mod_base = OTHER; note = 2'-O-methyluridine-3'-phosphate
  modified_base 20: mod_base = OTHER; note = 2'-O-methylcytidine-3'-phosphate
  modified_base 21: mod_base = OTHER; note = 2'-O-methyluridine-3'-phosphate N-[tris(GalNAc-alkyl)-amidodecanoyl)]-4-hydroxyprolinol (Hyp-(GalNAc-alkyl)3)
ttactgtcattgatgagatct

SEQ ID NO: 1253 - RNA, 21 nt, synthetic construct
  misc_feature 1..21: note = Description of Artificial Sequence: Synthetic oligonucleotide
  source 1..21: mol_type = other RNA
  modified_base 1: mod_base = OTHER; note = 2'-O-methylguanosine-3'-phosphorothioate
  modified_base 2: mod_base = OTHER; note = 2'-O-methyladenosine-3'-phosphorothioate
  modified_base 3: mod_base = OTHER; note = 2'-O-methylcytidine-3'-phosphate
  modified_base 4: mod_base = OTHER; note = 2'-O-methyluridine-3'-phosphate
  modified_base 5: mod_base = OTHER; note = 2'-O-methyluridine-3'-phosphate
  modified_base 6: mod_base = OTHER; note = 2'-O-methylguanosine-3'-phosphate
  modified_base 7: mod_base = OTHER; note = 2'-fluorocytidine-3'-phosphate
  modified_base 8: mod_base = OTHER; note = 2'-O-methyluridine-3'-phosphate
  modified_base 9: mod_base = OTHER; note = 2'-fluoroadenosine-3'-phosphate
  modified_base 10: mod_base = OTHER; note = 2'-fluorouridine-3'-phosphate
  modified_base 11: mod_base = OTHER; note = 2'-fluoroadenosine-3'-phosphate
  modified_base 12: mod_base = OTHER; note = 2'-O-methylcytidine-3'-phosphate
  modified_base 13: mod_base = OTHER; note = 2'-O-methyladenosine-3'-phosphate
  modified_base 14: mod_base = OTHER; note = 2'-O-methyluridine-3'-phosphate
  modified_base 15: mod_base = OTHER; note = 2'-O-methyluridine-3'-phosphate
  modified_base 16: mod_base = OTHER; note = 2'-O-methylguanosine-3'-phosphate
  modified_base 17: mod_base = OTHER; note = 2'-O-methylguanosine-3'-phosphate
  modified_base 18: mod_base = OTHER; note = 2'-O-methylcytidine-3'-phosphate
  modified_base 19: mod_base = OTHER; note = 2'-O-methyladenosine-3'-phosphate
  modified_base 20: mod_base = OTHER; note = 2'-O-methyladenosine-3'-phosphate
  modified_base 21: mod_base = OTHER; note = 2'-O-methyluridine-3'-phosphate N-[tris(GalNAc-alkyl)-amidodecanoyl)]-4-hydroxyprolinol (Hyp-(GalNAc-alkyl)3)
gacttgctatacattggcaat

SEQ ID NO: 1254 - RNA, 21 nt, synthetic construct
  misc_feature 1..21: note = Description of Artificial Sequence: Synthetic oligonucleotide
  source 1..21: mol_type = other RNA
  modified_base 1: mod_base = OTHER; note = 2'-O-methylguanosine-3'-phosphorothioate
  modified_base 2: mod_base = OTHER; note = 2'-O-methylguanosine-3'-phosphorothioate
  modified_base 3: mod_base = OTHER; note = 2'-O-methylguanosine-3'-phosphate
  modified_base 4: mod_base = OTHER; note = 2'-O-methylcytidine-3'-phosphate
  modified_base 5: mod_base = OTHER; note = 2'-O-methylcytidine-3'-phosphate
  modified_base 6: mod_base = OTHER; note = 2'-O-methyluridine-3'-phosphate
  modified_base 7: mod_base = OTHER; note = 2'-fluorouridine-3'-phosphate
  modified_base 8: mod_base = OTHER; note = 2'-O-methyluridine-3'-phosphate
  modified_base 9: mod_base = OTHER; note = 2'-fluoroguanosine-3'-phosphate
  modified_base 10: mod_base = OTHER; note = 2'-fluoroguanosine-3'-phosphate
  modified_base 11: mod_base = OTHER; note = 2'-fluorouridine-3'-phosphate
  modified_base 12: mod_base = OTHER; note = 2'-O-methylguanosine-3'-phosphate
  modified_base 13: mod_base = OTHER; note = 2'-O-methyladenosine-3'-phosphate
  modified_base 14: mod_base = OTHER; note = 2'-O-methyladenosine-3'-phosphate
  modified_base 15: mod_base = OTHER; note = 2'-O-methylcytidine-3'-phosphate
  modified_base 16: mod_base = OTHER; note = 2'-O-methylcytidine-3'-phosphate
  modified_base 17: mod_base = OTHER; note = 2'-O-methyladenosine-3'-phosphate
  modified_base 18: mod_base = OTHER; note = 2'-O-methyladenosine-3'-phosphate
  modified_base 19: mod_base = OTHER; note = 2'-O-methylguanosine-3'-phosphate
  modified_base 20: mod_base = OTHER; note = 2'-O-methyluridine-3'-phosphate
  modified_base 21: mod_base = OTHER; note = 2'-O-methyluridine-3'-phosphate N-[tris(GalNAc-alkyl)-amidodecanoyl)]-4-hydroxyprolinol (Hyp-(GalNAc-alkyl)3)
gggcctttggtgaaccaagtt

SEQ ID NO: 1255 - RNA, 21 nt, synthetic construct
  misc_feature 1..21: note = Description of Artificial Sequence: Synthetic oligonucleotide
  source 1..21: mol_type = other RNA
  modified_base 1: mod_base = OTHER; note = 2'-O-methyladenosine-3'-phosphorothioate
  modified_base 2: mod_base = OTHER; note = 2'-O-methylguanosine-3'-phosphorothioate
  modified_base 3: mod_base = OTHER; note = 2'-O-methylcytidine-3'-phosphate
  modified_base 4: mod_base = OTHER; note = 2'-O-methyladenosine-3'-phosphate
  modified_base 5: mod_base = OTHER; note = 2'-O-methyladenosine-3'-phosphate
  modified_base 6: mod_base = OTHER; note = 2'-O-methylcytidine-3'-phosphate
  modified_base 7: mod_base = OTHER; note = 2'-fluoroadenosine-3'-phosphate
  modified_base 8: mod_base = OTHER; note = 2'-O-methyluridine-3'-phosphate
  modified_base 9: mod_base = OTHER; note = 2'-fluoroguanosine-3'-phosphate
  modified_base 10: mod_base = OTHER; note = 2'-fluorouridine-3'-phosphate
  modified_base 11: mod_base = OTHER; note = 2'-fluoroguanosine-3'-phosphate
  modified_base 12: mod_base = OTHER; note = 2'-O-methyluridine-3'-phosphate
  modified_base 13: mod_base = OTHER; note = 2'-O-methyluridine-3'-phosphate
  modified_base 14: mod_base = OTHER; note = 2'-O-methylcytidine-3'-phosphate
  modified_base 15: mod_base = OTHER; note = 2'-O-methyladenosine-3'-phosphate
  modified_base 16: mod_base = OTHER; note = 2'-O-methyladenosine-3'-phosphate
  modified_base 17: mod_base = OTHER; note = 2'-O-methyladenosine-3'-phosphate
  modified_base 18: mod_base = OTHER; note = 2'-O-methylguanosine-3'-phosphate
  modified_base 19: mod_base = OTHER; note = 2'-O-methyluridine-3'-phosphate
  modified_base 20: mod_base = OTHER; note = 2'-O-methylcytidine-3'-phosphate
  modified_base 21: mod_base = OTHER; note = 2'-O-methyluridine-3'-phosphate N-[tris(GalNAc-alkyl)-amidodecanoyl)]-4-hydroxyprolinol (Hyp-(GalNAc-alkyl)3)
agcaacatgtgttcaaagtct

SEQ ID NO: 1256 - RNA, 21 nt, synthetic construct
  misc_feature 1..21: note = Description of Artificial Sequence: Synthetic oligonucleotide
  source 1..21: mol_type = other RNA
  modified_base 1: mod_base = OTHER; note = 2'-O-methylguanosine-3'-phosphorothioate
  modified_base 2: mod_base = OTHER; note = 2'-O-methyluridine-3'-phosphorothioate
  modified_base 3: mod_base = OTHER; note = 2'-O-methylcytidine-3'-phosphate
  modified_base 4: mod_base = OTHER; note = 2'-O-methyladenosine-3'-phosphate
  modified_base 5: mod_base = OTHER; note = 2'-O-methyladenosine-3'-phosphate
  modified_base 6: mod_base = OTHER; note = 2'-O-methylguanosine-3'-phosphate
  modified_base 7: mod_base = OTHER; note = 2'-fluoroguanosine-3'-phosphate
  modified_base 8: mod_base = OTHER; note = 2'-O-methyladenosine-3'-phosphate
  modified_base 9: mod_base = OTHER; note = 2'-fluorouridine-3'-phosphate
  modified_base 10: mod_base = OTHER; note = 2'-fluoroadenosine-3'-phosphate
  modified_base 11: mod_base = OTHER; note = 2'-fluorouridine-3'-phosphate
  modified_base 12: mod_base = OTHER; note = 2'-O-methylguanosine-3'-phosphate
  modified_base 13: mod_base = OTHER; note = 2'-O-methylguanosine-3'-phosphate
  modified_base 14: mod_base = OTHER; note = 2'-O-methyladenosine-3'-phosphate
  modified_base 15: mod_base = OTHER; note = 2'-O-methyladenosine-3'-phosphate
  modified_base 16: mod_base = OTHER; note = 2'-O-methyladenosine-3'-phosphate
  modified_base 17: mod_base = OTHER; note = 2'-O-methyladenosine-3'-phosphate
  modified_base 18: mod_base = OTHER; note = 2'-O-methylcytidine-3'-phosphate
  modified_base 19: mod_base = OTHER; note = 2'-O-methylcytidine-3'-phosphate
  modified_base 20: mod_base = OTHER; note = 2'-O-methyluridine-3'-phosphate
  modified_base 21: mod_base = OTHER; note = 2'-O-methyluridine-3'-phosphate N-[tris(GalNAc-alkyl)-amidodecanoyl)]-4-hydroxyprolinol (Hyp-(GalNAc-alkyl)3)
gtcaaggatatggaaaacctt

SEQ ID NO: 1257 - RNA, 21 nt, synthetic construct
  misc_feature 1..21: note = Description of Artificial Sequence: Synthetic oligonucleotide
  source 1..21: mol_type = other RNA
  modified_base 1: mod_base = OTHER; note = 2'-O-methylguanosine-3'-phosphorothioate
  modified_base 2: mod_base = OTHER; note = 2'-O-methyladenosine-3'-phosphorothioate
  modified_base 3: mod_base = OTHER; note = 2'-O-methyladenosine-3'-phosphate
  modified_base 4: mod_base = OTHER; note = 2'-O-methylguanosine-3'-phosphate
  modified_base 5: mod_base = OTHER; note = 2'-O-methyladenosine-3'-phosphate
  modified_base 6: mod_base = OTHER; note = 2'-O-methyluridine-3'-phosphate
  modified_base 7: mod_base = OTHER; note = 2'-fluoroguanosine-3'-phosphate
  modified_base 8: mod_base = OTHER; note = 2'-O-methyluridine-3'-phosphate
  modified_base 9: mod_base = OTHER; note = 2'-fluorouridine-3'-phosphate
  modified_base 10: mod_base = OTHER; note = 2'-fluorouridine-3'-phosphate
  modified_base 11: mod_base = OTHER; note = 2'-fluorouridine-3'-phosphate
  modified_base 12: mod_base = OTHER; note = 2'-O-methylcytidine-3'-phosphate
  modified_base 13: mod_base = OTHER; note = 2'-O-methyluridine-3'-phosphate
  modified_base 14: mod_base = OTHER; note = 2'-O-methyladenosine-3'-phosphate
  modified_base 15: mod_base = OTHER; note = 2'-O-methylcytidine-3'-phosphate
  modified_base 16: mod_base = OTHER; note = 2'-O-methylcytidine-3'-phosphate
  modified_base 17: mod_base = OTHER; note = 2'-O-methyladenosine-3'-phosphate
  modified_base 18: mod_base = OTHER; note = 2'-O-methyladenosine-3'-phosphate
  modified_base 19: mod_base = OTHER; note = 2'-O-methyladenosine-3'-phosphate
  modified_base 20: mod_base = OTHER; note = 2'-O-methyluridine-3'-phosphate
  modified_base 21: mod_base = OTHER; note = 2'-O-methyluridine-3'-phosphate N-[tris(GalNAc-alkyl)-amidodecanoyl)]-4-hydroxyprolinol (Hyp-(GalNAc-alkyl)3)
gaagatgttttctaccaaatt

SEQ ID NO: 1258 - RNA, 21 nt, synthetic construct
  misc_feature 1..21: note = Description of Artificial Sequence: Synthetic oligonucleotide
  source 1..21: mol_type = other RNA
  modified_base 1: mod_base = OTHER; note = 2'-O-methyladenosine-3'-phosphorothioate
  modified_base 2: mod_base = OTHER; note = 2'-O-methyluridine-3'-phosphorothioate
  modified_base 3: mod_base = OTHER; note = 2'-O-methylcytidine-3'-phosphate
  modified_base 4: mod_base = OTHER; note = 2'-O-methylguanosine-3'-phosphate
  modified_base 5: mod_base = OTHER; note = 2'-O-methyladenosine-3'-phosphate
  modified_base 6: mod_base = OTHER; note = 2'-O-methyluridine-3'-phosphate
  modified_base 7: mod_base = OTHER; note = 2'-fluoroguanosine-3'-phosphate
  modified_base 8: mod_base = OTHER; note = 2'-O-methyladenosine-3'-phosphate
  modified_base 9: mod_base = OTHER; note = 2'-fluoroadenosine-3'-phosphate
  modified_base 10: mod_base = OTHER; note = 2'-fluoroadenosine-3'-phosphate
  modified_base 11: mod_base = OTHER; note = 2'-fluoroguanosine-3'-phosphate
  modified_base 12: mod_base = OTHER; note = 2'-O-methylcytidine-3'-phosphate
  modified_base 13: mod_base = OTHER; note = 2'-O-methylcytidine-3'-phosphate
  modified_base 14: mod_base = OTHER; note = 2'-O-methyladenosine-3'-phosphate
  modified_base 15: mod_base = OTHER; note = 2'-O-methylguanosine-3'-phosphate
  modified_base 16: mod_base = OTHER; note = 2'-O-methyluridine-3'-phosphate
  modified_base 17: mod_base = OTHER; note = 2'-O-methylcytidine-3'-phosphate
  modified_base 18: mod_base = OTHER; note = 2'-O-methyluridine-3'-phosphate
  modified_base 19: mod_base = OTHER; note = 2'-O-methylcytidine-3'-phosphate
  modified_base 20: mod_base = OTHER; note = 2'-O-methyluridine-3'-phosphate
  modified_base 21: mod_base = OTHER; note = 2'-O-methyluridine-3'-phosphate N-[tris(GalNAc-alkyl)-amidodecanoyl)]-4-hydroxyprolinol (Hyp-(GalNAc-alkyl)3)
atcgatgaaagccagtctctt

SEQ ID NO: 1259 - RNA, 21 nt, synthetic construct
  misc_feature 1..21: note = Description of Artificial Sequence: Synthetic oligonucleotide
  source 1..21: mol_type = other RNA
  modified_base 1: mod_base = OTHER; note = 2'-O-methyluridine-3'-phosphorothioate
  modified_base 2: mod_base = OTHER; note = 2'-O-methylcytidine-3'-phosphorothioate
  modified_base 3: mod_base = OTHER; note = 2'-O-methyluridine-3'-phosphate
  modified_base 4: mod_base = OTHER; note = 2'-O-methylcytidine-3'-phosphate
  modified_base 5: mod_base = OTHER; note = 2'-O-methyluridine-3'-phosphate
  modified_base 6: mod_base = OTHER; note = 2'-O-methylguanosine-3'-phosphate
  modified_base 7: mod_base = OTHER; note = 2'-fluoroadenosine-3'-phosphate
  modified_base 8: mod_base = OTHER; note = 2'-O-methylguanosine-3'-phosphate
  modified_base 9: mod_base = OTHER; note = 2'-fluorouridine-3'-phosphate
  modified_base 10: mod_base = OTHER; note = 2'-fluorocytidine-3'-phosphate
  modified_base 11: mod_base = OTHER; note = 2'-fluorouridine-3'-phosphate
  modified_base 12: mod_base = OTHER; note = 2'-O-methylcytidine-3'-phosphate
  modified_base 13: mod_base = OTHER; note = 2'-O-methyluridine-3'-phosphate
  modified_base 14: mod_base = OTHER; note = 2'-O-methylguanosine-3'-phosphate
  modified_base 15: mod_base = OTHER; note = 2'-O-methyluridine-3'-phosphate
  modified_base 16: mod_base = OTHER; note = 2'-O-methylguanosine-3'-phosphate
  modified_base 17: mod_base = OTHER; note = 2'-O-methylguanosine-3'-phosphate
  modified_base 18: mod_base = OTHER; note = 2'-O-methylcytidine-3'-phosphate
  modified_base 19: mod_base = OTHER; note = 2'-O-methyladenosine-3'-phosphate
  modified_base 20: mod_base = OTHER; note = 2'-O-methyluridine-3'-phosphate
  modified_base 21: mod_base = OTHER; note = 2'-O-methyluridine-3'-phosphate N-[tris(GalNAc-alkyl)-amidodecanoyl)]-4-hydroxyprolinol (Hyp-(GalNAc-alkyl)3)
tctctgagtctctgtggcatt

SEQ ID NO: 1260 - RNA, 21 nt, synthetic construct
  misc_feature 1..21: note = Description of Artificial Sequence: Synthetic oligonucleotide
  source 1..21: mol_type = other RNA
  modified_base 1: mod_base = OTHER; note = 2'-O-methyluridine-3'-phosphorothioate
  modified_base 2: mod_base = OTHER; note = 2'-O-methylguanosine-3'-phosphorothioate
  modified_base 3: mod_base = OTHER; note = 2'-O-methylguanosine-3'-phosphate
  modified_base 4: mod_base = OTHER; note = 2'-O-methylguanosine-3'-phosphate
  modified_base 5: mod_base = OTHER; note = 2'-O-methyladenosine-3'-phosphate
  modified_base 6: mod_base = OTHER; note = 2'-O-methyladenosine-3'-phosphate
  modified_base 7: mod_base = OTHER; note = 2'-fluorocytidine-3'-phosphate
  modified_base 8: mod_base = OTHER; note = 2'-O-methyladenosine-3'-phosphate
  modified_base 9: mod_base = OTHER; note = 2'-fluorocytidine-3'-phosphate
  modified_base 10: mod_base = OTHER; note = 2'-fluoroadenosine-3'-phosphate
  modified_base 11: mod_base = OTHER; note = 2'-fluoroguanosine-3'-phosphate
  modified_base 12: mod_base = OTHER; note = 2'-O-methylguanosine-3'-phosphate
  modified_base 13: mod_base = OTHER; note = 2'-O-methyladenosine-3'-phosphate
  modified_base 14: mod_base = OTHER; note = 2'-O-methyladenosine-3'-phosphate
  modified_base 15: mod_base = OTHER; note = 2'-O-methylguanosine-3'-phosphate
  modified_base 16: mod_base = OTHER; note = 2'-O-methylguanosine-3'-phosphate
  modified_base 17: mod_base = OTHER; note = 2'-O-methylguanosine-3'-phosphate
  modified_base 18: mod_base = OTHER; note = 2'-O-methyluridine-3'-phosphate
  modified_base 19: mod_base = OTHER; note = 2'-O-methyladenosine-3'-phosphate
  modified_base 20: mod_base = OTHER; note = 2'-O-methylcytidine-3'-phosphate
  modified_base 21: mod_base = OTHER; note = 2'-O-methyluridine-3'-phosphate N-[tris(GalNAc-alkyl)-amidodecanoyl)]-4-hydroxyprolinol (Hyp-(GalNAc-alkyl)3)
tgggaacacaggaagggtact

SEQ ID NO: 1261 - RNA, 21 nt, synthetic construct
  misc_feature 1..21: note = Description of Artificial Sequence: Synthetic oligonucleotide
  source 1..21: mol_type = other RNA
  modified_base 1: mod_base = OTHER; note = 2'-O-methylcytidine-3'-phosphorothioate
  modified_base 2: mod_base = OTHER; note = 2'-O-methylguanosine-3'-phosphorothioate
  modified_base 3: mod_base = OTHER; note = 2'-O-methyladenosine-3'-phosphate
  modified_base 4: mod_base = OTHER; note = 2'-O-methyluridine-3'-phosphate
  modified_base 5: mod_base = OTHER; note = 2'-O-methyluridine-3'-phosphate
  modified_base 6: mod_base = OTHER; note = 2'-O-methyladenosine-3'-phosphate
  modified_base 7: mod_base = OTHER; note = 2'-fluorocytidine-3'-phosphate
  modified_base 8: mod_base = OTHER; note = 2'-O-methylcytidine-3'-phosphate
  modified_base 9: mod_base = OTHER; note = 2'-fluoroadenosine-3'-phosphate
  modified_base 10: mod_base = OTHER; note = 2'-fluorocytidine-3'-phosphate
  modified_base 11: mod_base = OTHER; note = 2'-fluoroadenosine-3'-phosphate
  modified_base 12: mod_base = OTHER; note = 2'-O-methyladenosine-3'-phosphate
  modified_base 13: mod_base = OTHER; note = 2'-O-methylguanosine-3'-phosphate
  modified_base 14: mod_base = OTHER; note = 2'-O-methylcytidine-3'-phosphate
  modified_base 15: mod_base = OTHER; note = 2'-O-methyladenosine-3'-phosphate
  modified_base 16: mod_base = OTHER; note = 2'-O-methyladenosine-3'-phosphate
  modified_base 17: mod_base = OTHER; note = 2'-O-methylcytidine-3'-phosphate
  modified_base 18: mod_base = OTHER; note = 2'-O-methylcytidine-3'-phosphate
  modified_base 19: mod_base = OTHER; note = 2'-O-methyladenosine-3'-phosphate
  modified_base 20: mod_base = OTHER; note = 2'-O-methyluridine-3'-phosphate
  modified_base 21: mod_base = OTHER; note = 2'-O-methyluridine-3'-phosphate N-[tris(GalNAc-alkyl)-amidodecanoyl)]-4-hydroxyprolinol (Hyp-(GalNAc-alkyl)3)
cgattaccacaagcaaccatt

SEQ ID NO: 1262 - RNA, 21 nt, synthetic construct
  misc_feature 1..21: note = Description of Artificial Sequence: Synthetic oligonucleotide
  source 1..21: mol_type = other RNA
  modified_base 1: mod_base = OTHER; note = 2'-O-methyluridine-3'-phosphorothioate
  modified_base 2: mod_base = OTHER; note = 2'-O-methylcytidine-3'-phosphorothioate
  modified_base 3: mod_base = OTHER; note = 2'-O-methyladenosine-3'-phosphate
  modified_base 4: mod_base = OTHER; note = 2'-O-methylguanosine-3'-phosphate
  modified_base 5: mod_base = OTHER; note = 2'-O-methyluridine-3'-phosphate
  modified_base 6: mod_base = OTHER; note = 2'-O-methylcytidine-3'-phosphate
  modified_base 7: mod_base = OTHER; note = 2'-fluoroadenosine-3'-phosphate
  modified_base 8: mod_base = OTHER; note = 2'-O-methyluridine-3'-phosphate
  modified_base 9: mod_base = OTHER; note = 2'-fluorouridine-3'-phosphate
  modified_base 10: mod_base = OTHER; note = 2'-fluorocytidine-3'-phosphate
  modified_base 11: mod_base = OTHER; note = 2'-fluoroguanosine-3'-phosphate
  modified_base 12: mod_base = OTHER; note = 2'-O-methylcytidine-3'-phosphate
  modified_base 13: mod_base = OTHER; note = 2'-O-methylcytidine-3'-phosphate
  modified_base 14: mod_base = OTHER; note = 2'-O-methylcytidine-3'-phosphate
  modified_base 15: mod_base = OTHER; note = 2'-O-methyluridine-3'-phosphate
  modified_base 16: mod_base = OTHER; note = 2'-O-methyluridine-3'-phosphate
  modified_base 17: mod_base = OTHER; note = 2'-O-methylcytidine-3'-phosphate
  modified_base 18: mod_base = OTHER; note = 2'-O-methyladenosine-3'-phosphate
  modified_base 19: mod_base = OTHER; note = 2'-O-methyladenosine-3'-phosphate
  modified_base 20: mod_base = OTHER; note = 2'-O-methyladenosine-3'-phosphate
  modified_base 21: mod_base = OTHER; note = 2'-O-methyluridine-3'-phosphate N-[tris(GalNAc-alkyl)-amidodecanoyl)]-4-hydroxyprolinol (Hyp-(GalNAc-alkyl)3)
tcagtcattcgcccttcaaat

SEQ ID NO: 1263 - RNA, 21 nt, synthetic construct
  misc_feature 1..21: note = Description of Artificial Sequence: Synthetic oligonucleotide
  source 1..21: mol_type = other RNA
  modified_base 1: mod_base = OTHER; note = 2'-O-methylguanosine-3'-phosphorothioate
  modified_base 2: mod_base = OTHER; note = 2'-O-methylguanosine-3'-phosphorothioate
  modified_base 3: mod_base = OTHER; note = 2'-O-methylguanosine-3'-phosphate
  modified_base 4: mod_base = OTHER; note = 2'-O-methyladenosine-3'-phosphate
  modified_base 5: mod_base = OTHER; note = 2'-O-methylcytidine-3'-phosphate
  modified_base 6: mod_base = OTHER; note = 2'-O-methyladenosine-3'-phosphate
  modified_base 7: mod_base = OTHER; note = 2'-fluorocytidine-3'-phosphate
  modified_base 8: mod_base = OTHER; note = 2'-O-methylguanosine-3'-phosphate
  modified_base 9: mod_base = OTHER; note = 2'-fluoroadenosine-3'-phosphate
  modified_base 10: mod_base = OTHER; note = 2'-fluoroguanosine-3'-phosphate
  modified_base 11: mod_base = OTHER; note = 2'-fluoroadenosine-3'-phosphate
  modified_base 12: mod_base = OTHER; note = 2'-O-methylguanosine-3'-phosphate
  modified_base 13: mod_base = OTHER; note = 2'-O-methylcytidine-3'-phosphate
  modified_base 14: mod_base = OTHER; note = 2'-O-methyluridine-3'-phosphate
  modified_base 15: mod_base = OTHER; note = 2'-O-methylguanosine-3'-phosphate
  modified_base 16: mod_base = OTHER; note = 2'-O-methyluridine-3'-phosphate
  modified_base 17: mod_base = OTHER; note = 2'-O-methyladenosine-3'-phosphate
  modified_base 18: mod_base = OTHER; note = 2'-O-methyluridine-3'-phosphate
  modified_base 19: mod_base = OTHER; note = 2'-O-methylguanosine-3'-phosphate
  modified_base 20: mod_base = OTHER; note = 2'-O-methylguanosine-3'-phosphate
  modified_base 21: mod_base = OTHER; note = 2'-O-methyluridine-3'-phosphate N-[tris(GalNAc-alkyl)-amidodecanoyl)]-4-hydroxyprolinol (Hyp-(GalNAc-alkyl)3)
gggacacgagagctgtatggt

SEQ ID NO: 1264 - RNA, 21 nt, synthetic construct
  misc_feature 1..21: note = Description of Artificial Sequence: Synthetic oligonucleotide
  source 1..21: mol_type = other RNA
  modified_base 1: mod_base = OTHER; note = 2'-O-methylcytidine-3'-phosphorothioate
  modified_base 2: mod_base = OTHER; note = 2'-O-methyladenosine-3'-phosphorothioate
  modified_base 3: mod_base = OTHER; note = 2'-O-methylguanosine-3'-phosphate
  modified_base 4: mod_base = OTHER; note = 2'-O-methylcytidine-3'-phosphate
  modified_base 5: mod_base = OTHER; note = 2'-O-methyladenosine-3'-phosphate
  modified_base 6: mod_base = OTHER; note = 2'-O-methylguanosine-3'-phosphate
  modified_base 7: mod_base = OTHER; note = 2'-fluorocytidine-3'-phosphate
  modified_base 8: mod_base = OTHER; note = 2'-O-methyladenosine-3'-phosphate
  modified_base 9: mod_base = OTHER; note = 2'-fluorocytidine-3'-phosphate
  modified_base 10: mod_base = OTHER; note = 2'-fluoroadenosine-3'-phosphate
  modified_base 11: mod_base = OTHER; note = 2'-fluorouridine-3'-phosphate
  modified_base 12: mod_base = OTHER; note = 2'-O-methyluridine-3'-phosphate
  modified_base 13: mod_base = OTHER; note = 2'-O-methylguanosine-3'-phosphate
  modified_base 14: mod_base = OTHER; note = 2'-O-methyluridine-3'-phosphate
  modified_base 15: mod_base = OTHER; note = 2'-O-methyluridine-3'-phosphate
  modified_base 16: mod_base = OTHER; note = 2'-O-methyluridine-3'-phosphate
  modified_base 17: mod_base = OTHER; note = 2'-O-methylcytidine-3'-phosphate
  modified_base 18: mod_base = OTHER; note = 2'-O-methyladenosine-3'-phosphate
  modified_base 19: mod_base = OTHER; note = 2'-O-methylcytidine-3'-phosphate
  modified_base 20: mod_base = OTHER; note = 2'-O-methyluridine-3'-phosphate
  modified_base 21: mod_base = OTHER; note = 2'-O-methyluridine-3'-phosphate N-[tris(GalNAc-alkyl)-amidodecanoyl)]-4-hydroxyprolinol (Hyp-(GalNAc-alkyl)3)
cagcagcacattgtttcactt

SEQ ID NO: 1265 - RNA, 21 nt, synthetic construct
  misc_feature 1..21: note = Description of Artificial Sequence: Synthetic oligonucleotide
  source 1..21: mol_type = other RNA
  modified_base 1: mod_base = OTHER; note = 2'-O-methyladenosine-3'-phosphorothioate
  modified_base 2: mod_base = OTHER; note = 2'-O-methyladenosine-3'-phosphorothioate
  modified_base 3: mod_base = OTHER; note = 2'-O-methylguanosine-3'-phosphate
  modified_base 4: mod_base = OTHER; note = 2'-O-methylguanosine-3'-phosphate
  modified_base 5: mod_base = OTHER; note = 2'-O-methyladenosine-3'-phosphate
  modified_base 6: mod_base = OTHER; note = 2'-O-methyladenosine-3'-phosphate
  modified_base 7: mod_base = OTHER; note = 2'-fluorocytidine-3'-phosphate
  modified_base 8: mod_base = OTHER; note = 2'-O-methyladenosine-3'-phosphate
  modified_base 9: mod_base = OTHER; note = 2'-fluorocytidine-3'-phosphate
  modified_base 10: mod_base = OTHER; note = 2'-fluorouridine-3'-phosphate
  modified_base 11: mod_base = OTHER; note = 2'-fluorocytidine-3'-phosphate
  modified_base 12: mod_base = OTHER; note = 2'-O-methyladenosine-3'-phosphate
  modified_base 13: mod_base = OTHER; note = 2'-O-methyladenosine-3'-phosphate
  modified_base 14: mod_base = OTHER; note = 2'-O-methyluridine-3'-phosphate
  modified_base 15: mod_base = OTHER; note = 2'-O-methylcytidine-3'-phosphate
  modified_base 16: mod_base = OTHER; note = 2'-O-methyladenosine-3'-phosphate
  modified_base 17: mod_base = OTHER; note = 2'-O-methyladenosine-3'-phosphate
  modified_base 18: mod_base = OTHER; note = 2'-O-methylguanosine-3'-phosphate
  modified_base 19: mod_base = OTHER; note = 2'-O-methylguanosine-3'-phosphate
  modified_base 20: mod_base = OTHER; note = 2'-O-methyluridine-3'-phosphate
  modified_base 21: mod_base = OTHER; note = 2'-O-methyluridine-3'-phosphate N-[tris(GalNAc-alkyl)-amidodecanoyl)]-4-hydroxyprolinol (Hyp-(GalNAc-alkyl)3)
aaggaacactcaatcaaggtt

SEQ ID NO: 1266 - RNA, 21 nt, synthetic construct
  misc_feature 1..21: note = Description of Artificial Sequence: Synthetic oligonucleotide
  source 1..21: mol_type = other RNA
  modified_base 1: mod_base = OTHER; note = 2'-O-methyluridine-3'-phosphorothioate
  modified_base 2: mod_base = OTHER; note = 2'-O-methyladenosine-3'-phosphorothioate
  modified_base 3: mod_base = OTHER; note = 2'-O-methylguanosine-3'-phosphate
  modified_base 4: mod_base = OTHER; note = 2'-O-methyladenosine-3'-phosphate
  modified_base 5: mod_base = OTHER; note = 2'-O-methyladenosine-3'-phosphate
  modified_base 6: mod_base = OTHER; note = 2'-O-methylguanosine-3'-phosphate
  modified_base 7: mod_base = OTHER; note = 2'-fluorouridine-3'-phosphate
  modified_base 8: mod_base = OTHER; note = 2'-O-methyladenosine-3'-phosphate
  modified_base 9: mod_base = OTHER; note = 2'-fluoroguanosine-3'-phosphate
  modified_base 10: mod_base = OTHER; note = 2'-fluorouridine-3'-phosphate
  modified_base 11: mod_base = OTHER; note = 2'-fluorocytidine-3'-phosphate
  modified_base 12: mod_base = OTHER; note = 2'-O-methylcytidine-3'-phosphate
  modified_base 13: mod_base = OTHER; note = 2'-O-methyluridine-3'-phosphate
  modified_base 14: mod_base = OTHER; note = 2'-O-methyladenosine-3'-phosphate
  modified_base 15: mod_base = OTHER; note = 2'-O-methyluridine-3'-phosphate
  modified_base 16: mod_base = OTHER; note = 2'-O-methyluridine-3'-phosphate
  modified_base 17: mod_base = OTHER; note = 2'-O-methyluridine-3'-phosphate
  modified_base 18: mod_base = OTHER; note = 2'-O-methylcytidine-3'-phosphate
  modified_base 19: mod_base = OTHER; note = 2'-O-methyladenosine-3'-phosphate
  modified_base 20: mod_base = OTHER; note = 2'-O-methylcytidine-3'-phosphate
  modified_base 21: mod_base = OTHER; note = 2'-O-methyluridine-3'-phosphate N-[tris(GalNAc-alkyl)-amidodecanoyl)]-4-hydroxyprolinol (Hyp-(GalNAc-alkyl)3)
tagaagtagtcctatttcact

SEQ ID NO: 1267 - RNA, 21 nt, synthetic construct
  misc_feature 1..21: note = Description of Artificial Sequence: Synthetic oligonucleotide
  source 1..21: mol_type = other RNA
  modified_base 1: mod_base = OTHER; note = 2'-O-methylcytidine-3'-phosphorothioate
  modified_base 2: mod_base = OTHER; note = 2'-O-methyladenosine-3'-phosphorothioate
  modified_base 3: mod_base = OTHER; note = 2'-O-methyladenosine-3'-phosphate
  modified_base 4: mod_base = OTHER; note = 2'-O-methylcytidine-3'-phosphate
  modified_base 5: mod_base = OTHER; note = 2'-O-methyluridine-3'-phosphate
  modified_base 6: mod_base = OTHER; note = 2'-O-methyladenosine-3'-phosphate
  modified_base 7: mod_base = OTHER; note = 2'-fluorocytidine-3'-phosphate
  modified_base 8: mod_base = OTHER; note = 2'-O-methyladenosine-3'-phosphate
  modified_base 9: mod_base = OTHER; note = 2'-fluoroadenosine-3'-phosphate
  modified_base 10: mod_base = OTHER; note = 2'-fluorocytidine-3'-phosphate
  modified_base 11: mod_base = OTHER; note = 2'-fluoroadenosine-3'-phosphate
  modified_base 12: mod_base = OTHER; note = 2'-O-methyluridine-3'-phosphate
  modified_base 13: mod_base = OTHER; note = 2'-O-methyluridine-3'-phosphate
  modified_base 14: mod_base = OTHER; note = 2'-O-methyladenosine-3'-phosphate
  modified_base 15: mod_base = OTHER; note = 2'-O-methyladenosine-3'-phosphate
  modified_base 16: mod_base = OTHER; note = 2'-O-methyluridine-3'-phosphate
  modified_base 17: mod_base = OTHER; note = 2'-O-methylguanosine-3'-phosphate
  modified_base 18: mod_base = OTHER; note = 2'-O-methylguanosine-3'-phosphate
  modified_base 19: mod_base = OTHER; note = 2'-O-methylguanosine-3'-phosphate
  modified_base 20: mod_base = OTHER; note = 2'-O-methyladenosine-3'-phosphate
  modified_base 21: mod_base = OTHER; note = 2'-O-methyluridine-3'-phosphate N-[tris(GalNAc-alkyl)-amidodecanoyl)]-4-hydroxyprolinol (Hyp-(GalNAc-alkyl)3)
caactacaacattaatgggat

SEQ ID NO: 1268 - RNA, 21 nt, synthetic construct
  misc_feature 1..21: note = Description of Artificial Sequence: Synthetic oligonucleotide
  source 1..21: mol_type = other RNA
  modified_base 1: mod_base = OTHER; note = 2'-O-methyluridine-3'-phosphorothioate
  modified_base 2: mod_base = OTHER; note = 2'-O-methyladenosine-3'-phosphorothioate
  modified_base 3: mod_base = OTHER; note = 2'-O-methyluridine-3'-phosphate
  modified_base 4: mod_base = OTHER; note = 2'-O-methylguanosine-3'-phosphate
  modified_base 5: mod_base = OTHER; note = 2'-O-methyladenosine-3'-phosphate
  modified_base 6: mod_base = OTHER; note = 2'-O-methylcytidine-3'-phosphate
  modified_base 7: mod_base = OTHER; note = 2'-fluoroguanosine-3'-phosphate
  modified_base 8: mod_base = OTHER; note = 2'-O-methyluridine-3'-phosphate
  modified_base 9: mod_base = OTHER; note = 2'-fluorouridine-3'-phosphate
  modified_base 10: mod_base = OTHER; note = 2'-fluoroguanosine-3'-phosphate
  modified_base 11: mod_base = OTHER; note = 2'-fluorocytidine-3'-phosphate
  modified_base 12: mod_base = OTHER; note = 2'-O-methylcytidine-3'-phosphate
  modified_base 13: mod_base = OTHER; note = 2'-O-methylcytidine-3'-phosphate
  modified_base 14: mod_base = OTHER; note = 2'-O-methyluridine-3'-phosphate
  modified_base 15: mod_base = OTHER; note = 2'-O-methylguanosine-3'-phosphate
  modified_base 16: mod_base = OTHER; note = 2'-O-methyladenosine-3'-phosphate
  modified_base 17: mod_base = OTHER; note = 2'-O-methyluridine-3'-phosphate
  modified_base 18: mod_base = OTHER; note = 2'-O-methylcytidine-3'-phosphate
  modified_base 19: mod_base = OTHER; note = 2'-O-methyladenosine-3'-phosphate
  modified_base 20: mod_base = OTHER; note = 2'-O-methyladenosine-3'-phosphate
  modified_base 21: mod_base = OTHER; note = 2'-O-methyluridine-3'-phosphate N-[tris(GalNAc-alkyl)-amidodecanoyl)]-4-hydroxyprolinol (Hyp-(GalNAc-alkyl)3)
tatgacgttgccctgatcaat

SEQ ID NO: 1269 - RNA, 21 nt, synthetic construct
  misc_feature 1..21: note = Description of Artificial Sequence: Synthetic oligonucleotide
  source 1..21: mol_type = other RNA
  modified_base 1: mod_base = OTHER; note = 2'-O-methylguanosine-3'-phosphorothioate
  modified_base 2: mod_base = OTHER; note = 2'-O-methylcytidine-3'-phosphorothioate
  modified_base 3: mod_base = OTHER; note = 2'-O-methyluridine-3'-phosphate
  modified_base 4: mod_base = OTHER; note = 2'-O-methylcytidine-3'-phosphate
  modified_base 5: mod_base = OTHER; note = 2'-O-methyladenosine-3'-phosphate
  modified_base 6: mod_base = OTHER; note = 2'-O-methyladenosine-3'-phosphate
  modified_base 7: mod_base = OTHER; note = 2'-fluoroguanosine-3'-phosphate
  modified_base 8: mod_base = OTHER; note = 2'-O-methyladenosine-3'-phosphate
  modified_base 9: mod_base = OTHER; note = 2'-fluoroadenosine-3'-phosphate
  modified_base 10: mod_base = OTHER; note = 2'-fluorouridine-3'-phosphate
  modified_base 11: mod_base = OTHER; note = 2'-fluoroadenosine-3'-phosphate
  modified_base 12: mod_base = OTHER; note = 2'-O-methyladenosine-3'-phosphate
  modified_base 13: mod_base = OTHER; note = 2'-O-methylguanosine-3'-phosphate
  modified_base 14: mod_base = OTHER; note = 2'-O-methylcytidine-3'-phosphate
  modified_base 15: mod_base = OTHER; note = 2'-O-methyluridine-3'-phosphate
  modified_base 16: mod_base = OTHER; note = 2'-O-methylguanosine-3'-phosphate
  modified_base 17: mod_base = OTHER; note = 2'-O-methyladenosine-3'-phosphate
  modified_base 18: mod_base = OTHER; note = 2'-O-methyladenosine-3'-phosphate
  modified_base 19: mod_base = OTHER; note = 2'-O-methyladenosine-3'-phosphate
  modified_base 20: mod_base = OTHER; note = 2'-O-methyluridine-3'-phosphate
  modified_base 21: mod_base = OTHER; note = 2'-O-methyluridine-3'-phosphate N-[tris(GalNAc-alkyl)-amidodecanoyl)]-4-hydroxyprolinol (Hyp-(GalNAc-alkyl)3)
gctcaagaataagctgaaatt

SEQ ID NO: 1270 - RNA, 21 nt, synthetic construct
  misc_feature 1..21: note = Description of Artificial Sequence: Synthetic oligonucleotide
  source 1..21: mol_type = other RNA
  modified_base 1: mod_base = OTHER; note = 2'-O-methyluridine-3'-phosphorothioate
  modified_base 2: mod_base = OTHER; note = 2'-O-methyluridine-3'-phosphorothioate
  modified_base 3: mod_base = OTHER; note = 2'-O-methylcytidine-3'-phosphate
  modified_base 4: mod_base = OTHER; note = 2'-O-methylcytidine-3'-phosphate
  modified_base 5: mod_base = OTHER; note = 2'-O-methyluridine-3'-phosphate
  modified_base 6: mod_base = OTHER; note = 2'-O-methylcytidine-3'-phosphate
  modified_base 7: mod_base = OTHER; note = 2'-fluorocytidine-3'-phosphate
  modified_base 8: mod_base = OTHER; note = 2'-O-methyladenosine-3'-phosphate
  modified_base 9: mod_base = OTHER; note = 2'-fluoroadenosine-3'-phosphate
  modified_base 10: mod_base = OTHER; note = 2'-fluorocytidine-3'-phosphate
  modified_base 11: mod_base = OTHER; note = 2'-fluorouridine-3'-phosphate
  modified_base 12: mod_base = OTHER; note = 2'-O-methyladenosine-3'-phosphate
  modified_base 13: mod_base = OTHER; note = 2'-O-methylcytidine-3'-phosphate
  modified_base 14: mod_base = OTHER; note = 2'-O-methylcytidine-3'-phosphate
  modified_base 15: mod_base = OTHER; note = 2'-O-methyladenosine-3'-phosphate
  modified_base 16: mod_base = OTHER; note = 2'-O-methylcytidine-3'-phosphate
  modified_base 17: mod_base = OTHER; note = 2'-O-methyluridine-3'-phosphate
  modified_base 18: mod_base = OTHER; note = 2'-O-methyluridine-3'-phosphate
  modified_base 19: mod_base = OTHER; note = 2'-O-methylguanosine-3'-phosphate
  modified_base 20: mod_base = OTHER; note = 2'-O-methylcytidine-3'-phosphate
  modified_base 21: mod_base = OTHER; note = 2'-O-methyluridine-3'-phosphate N-[tris(GalNAc-alkyl)-amidodecanoyl)]-4-hydroxyprolinol (Hyp-(GalNAc-alkyl)3)
ttcctccaactaccacttgct

SEQ ID NO: 1271 - RNA, 21 nt, synthetic construct
  misc_feature 1..21: note = Description of Artificial Sequence: Synthetic oligonucleotide
  source 1..21: mol_type = other RNA
  modified_base 1: mod_base = OTHER; note = 2'-O-methylcytidine-3'-phosphorothioate
  modified_base 2: mod_base = OTHER; note = 2'-O-methyluridine-3'-phosphorothioate
  modified_base 3: mod_base = OTHER; note = 2'-O-methyluridine-3'-phosphate
  modified_base 4: mod_base = OTHER; note = 2'-O-methylguanosine-3'-phosphate
  modified_base 5: mod_base = OTHER; note = 2'-O-methylcytidine-3'-phosphate
  modified_base 6: mod_base = OTHER; note = 2'-O-methylcytidine-3'-phosphate
  modified_base 7: mod_base = OTHER; note = 2'-fluoroadenosine-3'-phosphate
  modified_base 8: mod_base = OTHER; note = 2'-O-methylguanosine-3'-phosphate
  modified_base 9: mod_base = OTHER; note = 2'-fluorocytidine-3'-phosphate
  modified_base 10: mod_base = OTHER; note = 2'-fluoroadenosine-3'-phosphate
  modified_base 11: mod_base = OTHER; note = 2'-fluoroadenosine-3'-phosphate
  modified_base 12: mod_base = OTHER; note = 2'-O-methylcytidine-3'-phosphate
  modified_base 13: mod_base = OTHER; note = 2'-O-methyladenosine-3'-phosphate
  modified_base 14: mod_base = OTHER; note = 2'-O-methyladenosine-3'-phosphate
  modified_base 15: mod_base = OTHER; note = 2'-O-methyladenosine-3'-phosphate
  modified_base 16: mod_base = OTHER; note = 2'-O-methyladenosine-3'-phosphate
  modified_base 17: mod_base = OTHER; note = 2'-O-methylguanosine-3'-phosphate
  modified_base 18: mod_base = OTHER; note = 2'-O-methylguanosine-3'-phosphate
  modified_base 19: mod_base = OTHER; note = 2'-O-methyladenosine-3'-phosphate
  modified_base 20: mod_base = OTHER; note = 2'-O-methyladenosine-3'-phosphate
  modified_base 21: mod_base = OTHER; note = 2'-O-methyluridine-3'-phosphate N-[tris(GalNAc-alkyl)-amidodecanoyl)]-4-hydroxyprolinol (Hyp-(GalNAc-alkyl)3)
cttgccagcaacaaaaggaat

SEQ ID NO: 1272 - RNA, 21 nt, synthetic construct
  misc_feature 1..21: note = Description of Artificial Sequence: Synthetic oligonucleotide
  source 1..21: mol_type = other RNA
  modified_base 1: mod_base = OTHER; note = 2'-O-methylcytidine-3'-phosphorothioate
  modified_base 2: mod_base = OTHER; note = 2'-O-methyladenosine-3'-phosphorothioate
  modified_base 3: mod_base = OTHER; note = 2'-O-methylguanosine-3'-phosphate
  modified_base 4: mod_base = OTHER; note = 2'-O-methylguanosine-3'-phosphate
  modified_base 5: mod_base = OTHER; note = 2'-O-methyladenosine-3'-phosphate
  modified_base 6: mod_base = OTHER; note = 2'-O-methyluridine-3'-phosphate
  modified_base 7: mod_base = OTHER; note = 2'-fluoroadenosine-3'-phosphate
  modified_base 8: mod_base = OTHER; note = 2'-O-methyluridine-3'-phosphate
  modified_base 9: mod_base = OTHER; note = 2'-fluorocytidine-3'-phosphate
  modified_base 10: mod_base = OTHER; note = 2'-fluoroadenosine-3'-phosphate
  modified_base 11: mod_base = OTHER; note = 2'-fluoroadenosine-3'-phosphate
  modified_base 12: mod_base = OTHER; note = 2'-O-methyladenosine-3'-phosphate
  modified_base 13: mod_base = OTHER; note = 2'-O-methylguanosine-3'-phosphate
  modified_base 14: mod_base = OTHER; note = 2'-O-methylcytidine-3'-phosphate
  modified_base 15: mod_base = OTHER; note = 2'-O-methyluridine-3'-phosphate
  modified_base 16: mod_base = OTHER; note = 2'-O-methylcytidine-3'-phosphate
  modified_base 17: mod_base = OTHER; note = 2'-O-methyluridine-3'-phosphate
  modified_base 18: mod_base = OTHER; note = 2'-O-methylguanosine-3'-phosphate
  modified_base 19: mod_base = OTHER; note = 2'-O-methyluridine-3'-phosphate
  modified_base 20: mod_base = OTHER; note = 2'-O-methyluridine-3'-phosphate
  modified_base 21: mod_base = OTHER; note = 2'-O-methyluridine-3'-phosphate N-[tris(GalNAc-alkyl)-amidodecanoyl)]-4-hydroxyprolinol (Hyp-(GalNAc-alkyl)3)
caggatatcaaagctctgttt

SEQ ID NO: 1273 - RNA, 21 nt, synthetic construct
  misc_feature 1..21: note = Description of Artificial Sequence: Synthetic oligonucleotide
  source 1..21: mol_type = other RNA
  modified_base 1: mod_base = OTHER; note = 2'-O-methyluridine-3'-phosphorothioate
  modified_base 2: mod_base = OTHER; note = 2'-O-methyluridine-3'-phosphorothioate
  modified_base 3: mod_base = OTHER; note = 2'-O-methylguanosine-3'-phosphate
  modified_base 4: mod_base = OTHER; note = 2'-O-methyluridine-3'-phosphate
  modified_base 5: mod_base = OTHER; note = 2'-O-methylguanosine-3'-phosphate
  modified_base 6: mod_base = OTHER; note = 2'-O-methyluridine-3'-phosphate
  modified_base 7: mod_base = OTHER; note = 2'-fluorocytidine-3'-phosphate
  modified_base 8: mod_base = OTHER; note = 2'-O-methyluridine-3'-phosphate
  modified_base 9: mod_base = OTHER; note = 2'-fluoroguanosine-3'-phosphate
  modified_base 10: mod_base = OTHER; note = 2'-fluoroadenosine-3'-phosphate
  modified_base 11: mod_base = OTHER; note = 2'-fluoroguanosine-3'-phosphate
  modified_base 12: mod_base = OTHER; note = 2'-O-methylguanosine-3'-phosphate
  modified_base 13: mod_base = OTHER; note = 2'-O-methyladenosine-3'-phosphate
  modified_base 14: mod_base = OTHER; note = 2'-O-methylguanosine-3'-phosphate
  modified_base 15: mod_base = OTHER; note = 2'-O-methylguanosine-3'-phosphate
  modified_base 16: mod_base = OTHER; note = 2'-O-methyladenosine-3'-phosphate
  modified_base 17: mod_base = OTHER; note = 2'-O-methylguanosine-3'-phosphate
  modified_base 18: mod_base = OTHER; note = 2'-O-methyladenosine-3'-phosphate
  modified_base 19: mod_base = OTHER; note = 2'-O-methyladenosine-3'-phosphate
  modified_base 20: mod_base = OTHER; note = 2'-O-methyladenosine-3'-phosphate
  modified_base 21: mod_base = OTHER; note = 2'-O-methyluridine-3'-phosphate N-[tris(GalNAc-alkyl)-amidodecanoyl)]-4-hydroxyprolinol (Hyp-(GalNAc-alkyl)3)
ttgtgtctgaggaggagaaat

SEQ ID NO: 1274 - RNA, 21 nt, synthetic construct
  misc_feature 1..21: note = Description of Artificial Sequence: Synthetic oligonucleotide
  source 1..21: mol_type = other RNA
  modified_base 1: mod_base = OTHER; note = 2'-O-methylguanosine-3'-phosphorothioate
  modified_base 2: mod_base = OTHER; note = 2'-O-methylguanosine-3'-phosphorothioate
  modified_base 3: mod_base = OTHER; note = 2'-O-methyladenosine-3'-phosphate
  modified_base 4: mod_base = OTHER; note = 2'-O-methylguanosine-3'-phosphate
  modified_base 5: mod_base = OTHER; note = 2'-O-methylguanosine-3'-phosphate
  modified_base 6: mod_base = OTHER; note = 2'-O-methyluridine-3'-phosphate
  modified_base 7: mod_base = OTHER; note = 2'-fluorocytidine-3'-phosphate
  modified_base 8: mod_base = OTHER; note = 2'-O-methyluridine-3'-phosphate
  modified_base 9: mod_base = OTHER; note = 2'-fluoroadenosine-3'-phosphate
  modified_base 10: mod_base = OTHER; note = 2'-fluorocytidine-3'-phosphate
  modified_base 11: mod_base = OTHER; note = 2'-fluoroadenosine-3'-phosphate
  modified_base 12: mod_base = OTHER; note = 2'-O-methyluridine-3'-phosphate
  modified_base 13: mod_base = OTHER; note = 2'-O-methylcytidine-3'-phosphate
  modified_base 14: mod_base = OTHER; note = 2'-O-methyladenosine-3'-phosphate
  modified_base 15: mod_base = OTHER; note = 2'-O-methyladenosine-3'-phosphate
  modified_base 16: mod_base = OTHER; note = 2'-O-methylguanosine-3'-phosphate
  modified_base 17: mod_base = OTHER; note = 2'-O-methyladenosine-3'-phosphate
  modified_base 18: mod_base = OTHER; note = 2'-O-methyladenosine-3'-phosphate
  modified_base 19: mod_base = OTHER; note = 2'-O-methyluridine-3'-phosphate
  modified_base 20: mod_base = OTHER; note = 2'-O-methylguanosine-3'-phosphate
  modified_base 21: mod_base = OTHER; note = 2'-O-methyluridine-3'-phosphate N-[tris(GalNAc-alkyl)-amidodecanoyl)]-4-hydroxyprolinol (Hyp-(GalNAc-alkyl)3)
ggaggtctacatcaagaatgt

SEQ ID NO: 1275 - RNA, 21 nt, synthetic construct
  misc_feature 1..21: note = Description of Artificial Sequence: Synthetic oligonucleotide
  source 1..21: mol_type = other RNA
  modified_base 1: mod_base = OTHER; note = 2'-O-methyluridine-3'-phosphorothioate
  modified_base 2: mod_base = OTHER; note = 2'-O-methylcytidine-3'-phosphorothioate
  modified_base 3: mod_base = OTHER; note = 2'-O-methylguanosine-3'-phosphate
  modified_base 4: mod_base = OTHER; note = 2'-O-methylguanosine-3'-phosphate
  modified_base 5: mod_base = OTHER; note = 2'-O-methyluridine-3'-phosphate
  modified_base 6: mod_base = OTHER; note = 2'-O-methyluridine-3'-phosphate
  modified_base 7: mod_base = OTHER; note = 2'-fluorocytidine-3'-phosphate
  modified_base 8: mod_base = OTHER; note = 2'-O-methylcytidine-3'-phosphate
  modified_base 9: mod_base = OTHER; note = 2'-fluorouridine-3'-phosphate
  modified_base 10: mod_base = OTHER; note = 2'-fluorouridine-3'-phosphate
  modified_base 11: mod_base = OTHER; note = 2'-fluorouridine-3'-phosphate
  modified_base 12: mod_base = OTHER; note = 2'-O-methylguanosine-3'-phosphate
  modified_base 13: mod_base = OTHER; note = 2'-O-methyluridine-3'-phosphate
  modified_base 14: mod_base = OTHER; note = 2'-O-methyladenosine-3'-phosphate
  modified_base 15: mod_base = OTHER; note = 2'-O-methylcytidine-3'-phosphate
  modified_base 16: mod_base = OTHER; note = 2'-O-methyluridine-3'-phosphate
  modified_base 17: mod_base = OTHER; note = 2'-O-methylguanosine-3'-phosphate
  modified_base 18: mod_base = OTHER; note = 2'-O-methylguanosine-3'-phosphate
  modified_base 19: mod_base = OTHER; note = 2'-O-methyladenosine-3'-phosphate
  modified_base 20: mod_base = OTHER; note = 2'-O-methylguanosine-3'-phosphate
  modified_base 21: mod_base = OTHER; note = 2'-O-methyluridine-3'-phosphate N-[tris(GalNAc-alkyl)-amidodecanoyl)]-4-hydroxyprolinol (Hyp-(GalNAc-alkyl)3)
tcggttcctttgtactggagt

SEQ ID NO: 1276 - RNA, 21 nt, synthetic construct
  misc_feature 1..21: note = Description of Artificial Sequence: Synthetic oligonucleotide
  source 1..21: mol_type = other RNA
  modified_base 1: mod_base = OTHER; note = 2'-O-methylguanosine-3'-phosphorothioate
  modified_base 2: mod_base = OTHER; note = 2'-O-methyladenosine-3'-phosphorothioate
  modified_base 3: mod_base = OTHER; note = 2'-O-methylguanosine-3'-phosphate
  modified_base 4: mod_base = OTHER; note = 2'-O-methyluridine-3'-phosphate
  modified_base 5: mod_base = OTHER; note = 2'-O-methylguanosine-3'-phosphate
  modified_base 6: mod_base = OTHER; note = 2'-O-methyladenosine-3'-phosphate
  modified_base 7: mod_base = OTHER; note = 2'-fluoroguanosine-3'-phosphate
  modified_base 8: mod_base = OTHER; note = 2'-O-methyluridine-3'-phosphate
  modified_base 9: mod_base = OTHER; note = 2'-fluorocytidine-3'-phosphate
  modified_base 10: mod_base = OTHER; note = 2'-fluorocytidine-3'-phosphate
  modified_base 11: mod_base = OTHER; note = 2'-fluorocytidine-3'-phosphate
  modified_base 12: mod_base = OTHER; note = 2'-O-methyluridine-3'-phosphate
  modified_base 13: mod_base = OTHER; note = 2'-O-methyladenosine-3'-phosphate
  modified_base 14: mod_base = OTHER; note = 2'-O-methyluridine-3'-phosphate
  modified_base 15: mod_base = OTHER; note = 2'-O-methylguanosine-3'-phosphate
  modified_base 16: mod_base = OTHER; note = 2'-O-methylcytidine-3'-phosphate
  modified_base 17: mod_base = OTHER; note = 2'-O-methyluridine-3'-phosphate
  modified_base 18: mod_base = OTHER; note = 2'-O-methylguanosine-3'-phosphate
  modified_base 19: mod_base = OTHER; note = 2'-O-methyladenosine-3'-phosphate
  modified_base 20: mod_base = OTHER; note = 2'-O-methylcytidine-3'-phosphate
  modified_base 21: mod_base = OTHER; note = 2'-O-methyluridine-3'-phosphate N-[tris(GalNAc-alkyl)-amidodecanoyl)]-4-hydroxyprolinol (Hyp-(GalNAc-alkyl)3)
gagtgagtccctatgctgact

SEQ ID NO: 1277 - RNA, 21 nt, synthetic construct
  misc_feature 1..21: note = Description of Artificial Sequence: Synthetic oligonucleotide
  source 1..21: mol_type = other RNA
  modified_base 1: mod_base = OTHER; note = 2'-O-methyluridine-3'-phosphorothioate
  modified_base 2: mod_base = OTHER; note = 2'-O-methyladenosine-3'-phosphorothioate
  modified_base 3: mod_base = OTHER; note = 2'-O-methylcytidine-3'-phosphate
  modified_base 4: mod_base = OTHER; note = 2'-O-methyluridine-3'-phosphate
  modified_base 5: mod_base = OTHER; note = 2'-O-methyluridine-3'-phosphate
  modified_base 6: mod_base = OTHER; note = 2'-O-methylguanosine-3'-phosphate
  modified_base 7: mod_base = OTHER; note = 2'-fluorocytidine-3'-phosphate
  modified_base 8: mod_base = OTHER; note = 2'-O-methyladenosine-3'-phosphate
  modified_base 9: mod_base = OTHER; note = 2'-fluoroguanosine-3'-phosphate
  modified_base 10: mod_base = OTHER; note = 2'-fluoroadenosine-3'-phosphate
  modified_base 11: mod_base = OTHER; note = 2'-fluoroguanosine-3'-phosphate
  modified_base 12: mod_base = OTHER; note = 2'-O-methylguanosine-3'-phosphate
  modified_base 13: mod_base = OTHER; note = 2'-O-methyluridine-3'-phosphate
  modified_base 14: mod_base = OTHER; note = 2'-O-methylguanosine-3'-phosphate
  modified_base 15: mod_base = OTHER; note = 2'-O-methyladenosine-3'-phosphate
  modified_base 16: mod_base = OTHER; note = 2'-O-methyluridine-3'-phosphate
  modified_base 17: mod_base = OTHER; note = 2'-O-methyluridine-3'-phosphate
  modified_base 18: mod_base = OTHER; note = 2'-O-methylcytidine-3'-phosphate
  modified_base 19: mod_base = OTHER; note = 2'-O-methyluridine-3'-phosphate
  modified_base 20: mod_base = OTHER; note = 2'-O-methylguanosine-3'-phosphate
  modified_base 21: mod_base = OTHER; note = 2'-O-methyluridine-3'-phosphate N-[tris(GalNAc-alkyl)-amidodecanoyl)]-4-hydroxyprolinol (Hyp-(GalNAc-alkyl)3)
tacttgcagaggtgattctgt

SEQ ID NO: 1278 - RNA, 21 nt, synthetic construct
  misc_feature 1..21: note = Description of Artificial Sequence: Synthetic oligonucleotide
  source 1..21: mol_type = other RNA
  modified_base 1: mod_base = OTHER; note = 2'-O-methyluridine-3'-phosphorothioate
  modified_base 2: mod_base = OTHER; note = 2'-O-methylcytidine-3'-phosphorothioate
  modified_base 3: mod_base = OTHER; note = 2'-O-methyladenosine-3'-phosphate
  modified_base 4: mod_base = OTHER; note = 2'-O-methyluridine-3'-phosphate
  modified_base 5: mod_base = OTHER; note = 2'-O-methyluridine-3'-phosphate
  modified_base 6: mod_base = OTHER; note = 2'-O-methylcytidine-3'-phosphate
  modified_base 7: mod_base = OTHER; note = 2'-fluoroadenosine-3'-phosphate
  modified_base 8: mod_base = OTHER; note = 2'-O-methyladenosine-3'-phosphate
  modified_base 9: mod_base = OTHER; note = 2'-fluoroguanosine-3'-phosphate
  modified_base 10: mod_base = OTHER; note = 2'-fluorouridine-3'-phosphate
  modified_base 11: mod_base = OTHER; note = 2'-fluorouridine-3'-phosphate
  modified_base 12: mod_base = OTHER; note = 2'-O-methylguanosine-3'-phosphate
  modified_base 13: mod_base = OTHER; note = 2'-O-methylguanosine-3'-phosphate
  modified_base 14: mod_base = OTHER; note = 2'-O-methyluridine-3'-phosphate
  modified_base 15: mod_base = OTHER; note = 2'-O-methylguanosine-3'-phosphate
  modified_base 16: mod_base = OTHER; note = 2'-O-methyluridine-3'-phosphate
  modified_base 17: mod_base = OTHER; note = 2'-O-methyladenosine-3'-phosphate
  modified_base 18: mod_base = OTHER; note = 2'-O-methyladenosine-3'-phosphate
  modified_base 19: mod_base = OTHER; note = 2'-O-methyluridine-3'-phosphate
  modified_base 20: mod_base = OTHER; note = 2'-O-methylcytidine-3'-phosphate
  modified_base 21: mod_base = OTHER; note = 2'-O-methyluridine-3'-phosphate N-[tris(GalNAc-alkyl)-amidodecanoyl)]-4-hydroxyprolinol (Hyp-(GalNAc-alkyl)3)
tcattcaagttggtgtaatct

SEQ ID NO: 1279 - RNA, 21 nt, synthetic construct
  misc_feature 1..21: note = Description of Artificial Sequence: Synthetic oligonucleotide
  source 1..21: mol_type = other RNA
  modified_base 1: mod_base = OTHER; note = 2'-O-methylguanosine-3'-phosphorothioate
  modified_base 2: mod_base = OTHER; note = 2'-O-methyladenosine-3'-phosphorothioate
  modified_base 3: mod_base = OTHER; note = 2'-O-methylguanosine-3'-phosphate
  modified_base 4: mod_base = OTHER; note = 2'-O-methyluridine-3'-phosphate
  modified_base 5: mod_base = OTHER; note = 2'-O-methyladenosine-3'-phosphate
  modified_base 6: mod_base = OTHER; note = 2'-O-methylguanosine-3'-phosphate
  modified_base 7: mod_base = OTHER; note = 2'-fluorouridine-3'-phosphate
  modified_base 8: mod_base = OTHER; note = 2'-O-methylguanosine-3'-phosphate
  modified_base 9: mod_base = OTHER; note = 2'-fluoroguanosine-3'-phosphate
  modified_base 10: mod_base = OTHER; note = 2'-fluoroadenosine-3'-phosphate
  modified_base 11: mod_base = OTHER; note = 2'-fluorouridine-3'-phosphate
  modified_base 12: mod_base = OTHER; note = 2'-O-methylguanosine-3'-phosphate
  modified_base 13: mod_base = OTHER; note = 2'-O-methyluridine-3'-phosphate
  modified_base 14: mod_base = OTHER; note = 2'-O-methylcytidine-3'-phosphate
  modified_base 15: mod_base = OTHER; note = 2'-O-methyluridine-3'-phosphate
  modified_base 16: mod_base = OTHER; note = 2'-O-methylguanosine-3'-phosphate
  modified_base 17: mod_base = OTHER; note = 2'-O-methylcytidine-3'-phosphate
  modified_base 18: mod_base = OTHER; note = 2'-O-methyladenosine-3'-phosphate
  modified_base 19: mod_base = OTHER; note = 2'-O-methyladenosine-3'-phosphate
  modified_base 20: mod_base = OTHER; note = 2'-O-methyladenosine-3'-phosphate
  modified_base 21: mod_base = OTHER; note = 2'-O-methyluridine-3'-phosphate N-[tris(GalNAc-alkyl)-amidodecanoyl)]-4-hydroxyprolinol (Hyp-(GalNAc-alkyl)3)
gagtagtggatgtctgcaaat

SEQ ID NO: 1280 - RNA, 21 nt, synthetic construct
  misc_feature 1..21: note = Description of Artificial Sequence: Synthetic oligonucleotide
  source 1..21: mol_type = other RNA
  modified_base 1: mod_base = OTHER; note = 2'-O-methyladenosine-3'-phosphorothioate
  modified_base 2: mod_base = OTHER; note = 2'-O-methyladenosine-3'-phosphorothioate
  modified_base 3: mod_base = OTHER; note = 2'-O-methylcytidine-3'-phosphate
  modified_base 4: mod_base = OTHER; note = 2'-O-methylcytidine-3'-phosphate
  modified_base 5: mod_base = OTHER; note = 2'-O-methyladenosine-3'-phosphate
  modified_base 6: mod_base = OTHER; note = 2'-O-methylguanosine-3'-phosphate
  modified_base 7: mod_base = OTHER; note = 2'-fluoroadenosine-3'-phosphate
  modified_base 8: mod_base = OTHER; note = 2'-O-methyladenosine-3'-phosphate
  modified_base 9: mod_base = OTHER; note = 2'-fluoroguanosine-3'-phosphate
  modified_base 10: mod_base = OTHER; note = 2'-fluorocytidine-3'-phosphate
  modified_base 11: mod_base = OTHER; note = 2'-fluoroguanosine-3'-phosphate
  modified_base 12: mod_base = OTHER; note = 2'-O-methylguanosine-3'-phosphate
  modified_base 13: mod_base = OTHER; note = 2'-O-methylcytidine-3'-phosphate
  modified_base 14: mod_base = OTHER; note = 2'-O-methyladenosine-3'-phosphate
  modified_base 15: mod_base = OTHER; note = 2'-O-methyladenosine-3'-phosphate
  modified_base 16: mod_base = OTHER; note = 2'-O-methyladenosine-3'-phosphate
  modified_base 17: mod_base = OTHER; note = 2'-O-methyladenosine-3'-phosphate
  modified_base 18: mod_base = OTHER; note = 2'-O-methylguanosine-3'-phosphate
  modified_base 19: mod_base = OTHER; note = 2'-O-methylcytidine-3'-phosphate
  modified_base 20: mod_base = OTHER; note = 2'-O-methyladenosine-3'-phosphate
  modified_base 21: mod_base = OTHER; note = 2'-O-methyluridine-3'-phosphate N-[tris(GalNAc-alkyl)-amidodecanoyl)]-4-hydroxyprolinol (Hyp-(GalNAc-alkyl)3)
aaccagaagcggcaaaagcat

SEQ ID NO: 1281 - RNA, 21 nt, synthetic construct
  misc_feature 1..21: note = Description of Artificial Sequence: Synthetic oligonucleotide
  source 1..21: mol_type = other RNA
  modified_base 1: mod_base = OTHER; note = 2'-O-methylguanosine-3'-phosphorothioate
  modified_base 2: mod_base = OTHER; note = 2'-O-methyladenosine-3'-phosphorothioate
  modified_base 3: mod_base = OTHER; note = 2'-O-methylcytidine-3'-phosphate
  modified_base 4: mod_base = OTHER; note = 2'-O-methyluridine-3'-phosphate
  modified_base 5: mod_base = OTHER; note = 2'-O-methyluridine-3'-phosphate
  modified_base 6: mod_base = OTHER; note = 2'-O-methyluridine-3'-phosphate
  modified_base 7: mod_base = OTHER; note = 2'-fluorocytidine-3'-phosphate
  modified_base 8: mod_base = OTHER; note = 2'-O-methyladenosine-3'-phosphate
  modified_base 9: mod_base = OTHER; note = 2'-fluorocytidine-3'-phosphate
  modified_base 10: mod_base = OTHER; note = 2'-fluoroadenosine-3'-phosphate
  modified_base 11: mod_base = OTHER; note = 2'-fluorouridine-3'-phosphate
  modified_base 12: mod_base = OTHER; note = 2'-O-methylcytidine-3'-phosphate
  modified_base 13: mod_base = OTHER; note = 2'-O-methyladenosine-3'-phosphate
  modified_base 14: mod_base = OTHER; note = 2'-O-methyladenosine-3'-phosphate
  modified_base 15: mod_base = OTHER; note = 2'-O-methylcytidine-3'-phosphate
  modified_base 16: mod_base = OTHER; note = 2'-O-methylcytidine-3'-phosphate
  modified_base 17: mod_base = OTHER; note = 2'-O-methyluridine-3'-phosphate
  modified_base 18: mod_base = OTHER; note = 2'-O-methylcytidine-3'-phosphate
  modified_base 19: mod_base = OTHER; note = 2'-O-methyluridine-3'-phosphate
  modified_base 20: mod_base = OTHER; note = 2'-O-methyluridine-3'-phosphate
  modified_base 21: mod_base = OTHER; note = 2'-O-methyluridine-3'-phosphate N-[tris(GalNAc-alkyl)-amidodecanoyl)]-4-hydroxyprolinol (Hyp-(GalNAc-alkyl)3)
gactttcacatcaacctcttt

SEQ ID NO: 1282 - RNA, 21 nt, synthetic construct
  misc_feature 1..21: note = Description of Artificial Sequence: Synthetic oligonucleotide
  source 1..21: mol_type = other RNA
  modified_base 1: mod_base = OTHER; note = 2'-O-methylcytidine-3'-phosphorothioate
  modified_base 2: mod_base = OTHER; note = 2'-O-methyluridine-3'-phosphorothioate
  modified_base 3: mod_base = OTHER; note = 2'-O-methylcytidine-3'-phosphate
  modified_base 4: mod_base = OTHER; note = 2'-O-methyluridine-3'-phosphate
  modified_base 5: mod_base = OTHER; note = 2'-O-methyluridine-3'-phosphate
  modified_base 6: mod_base = OTHER; note = 2'-O-methyluridine-3'-phosphate
  modified_base 7: mod_base = OTHER; note = 2'-fluorocytidine-3'-phosphate
  modified_base 8: mod_base = OTHER; note = 2'-O-methyladenosine-3'-phosphate
  modified_base 9: mod_base = OTHER; note = 2'-fluoroadenosine-3'-phosphate
  modified_base 10: mod_base = OTHER; note = 2'-fluoroguanosine-3'-phosphate
  modified_base 11: mod_base = OTHER; note = 2'-fluorouridine-3'-phosphate
  modified_base 12: mod_base = OTHER; note = 2'-O-methylguanosine-3'-phosphate
  modified_base 13: mod_base = OTHER; note = 2'-O-methylcytidine-3'-phosphate
  modified_base 14: mod_base = OTHER; note = 2'-O-methyluridine-3'-phosphate
  modified_base 15: mod_base = OTHER; note = 2'-O-methylguanosine-3'-phosphate
  modified_base 16: mod_base = OTHER; note = 2'-O-methylcytidine-3'-phosphate
  modified_base 17: mod_base = OTHER; note = 2'-O-methylcytidine-3'-phosphate
  modified_base 18: mod_base = OTHER; note = 2'-O-methylcytidine-3'-phosphate
  modified_base 19: mod_base = OTHER; note = 2'-O-methyluridine-3'-phosphate
  modified_base 20: mod_base = OTHER; note = 2'-O-methylguanosine-3'-phosphate
  modified_base 21: mod_base = OTHER; note = 2'-O-methyluridine-3'-phosphate N-[tris(GalNAc-alkyl)-amidodecanoyl)]-4-hydroxyprolinol (Hyp-(GalNAc-alkyl)3)
ctctttcaagtgctgccctgt

SEQ ID NO: 1283 - RNA, 21 nt, synthetic construct
  misc_feature 1..21: note = Description of Artificial Sequence: Synthetic oligonucleotide
  source 1..21: mol_type = other RNA
  modified_base 1: mod_base = OTHER; note = 2'-O-methyladenosine-3'-phosphorothioate
  modified_base 2: mod_base = OTHER; note = 2'-O-methyladenosine-3'-phosphorothioate
  modified_base 3: mod_base = OTHER; note = 2'-O-methylguanosine-3'-phosphate
  modified_base 4: mod_base = OTHER; note = 2'-O-methylguanosine-3'-phosphate
  modified_base 5: mod_base = OTHER; note = 2'-O-methyladenosine-3'-phosphate
  modified_base 6: mod_base = OTHER; note = 2'-O-methylguanosine-3'-phosphate
  modified_base 7: mod_base = OTHER; note = 2'-fluoroadenosine-3'-phosphate
  modified_base 8: mod_base = OTHER; note = 2'-O-methyladenosine-3'-phosphate
  modified_base 9: mod_base = OTHER; note = 2'-fluoroadenosine-3'-phosphate
  modified_base 10: mod_base = OTHER; note = 2'-fluorocytidine-3'-phosphate
  modified_base 11: mod_base = OTHER; note = 2'-fluorouridine-3'-phosphate
  modified_base 12: mod_base = OTHER; note = 2'-O-methylcytidine-3'-phosphate
  modified_base 13: mod_base = OTHER; note = 2'-O-methylcytidine-3'-phosphate
  modified_base 14: mod_base = OTHER; note = 2'-O-methyladenosine-3'-phosphate
  modified_base 15: mod_base = OTHER; note = 2'-O-methyladenosine-3'-phosphate
  modified_base 16: mod_base = OTHER; note = 2'-O-methylguanosine-3'-phosphate
  modified_base 17: mod_base = OTHER; note = 2'-O-methyladenosine-3'-phosphate
  modified_base 18: mod_base = OTHER; note = 2'-O-methyluridine-3'-phosphate
  modified_base 19: mod_base = OTHER; note = 2'-O-methylguanosine-3'-phosphate
  modified_base 20: mod_base = OTHER; note = 2'-O-methyladenosine-3'-phosphate
  modified_base 21: mod_base = OTHER; note = 2'-O-methyluridine-3'-phosphate N-[tris(GalNAc-alkyl)-amidodecanoyl)]-4-hydroxyprolinol (Hyp-(GalNAc-alkyl)3)
aaggagaaactccaagatgat

SEQ ID NO: 1284 - RNA, 21 nt, synthetic construct
  misc_feature 1..21: note = Description of Artificial Sequence: Synthetic oligonucleotide
  source 1..21: mol_type = other RNA
  modified_base 1: mod_base = OTHER; note = 2'-O-methylguanosine-3'-phosphorothioate
  modified_base 2: mod_base = OTHER; note = 2'-O-methyladenosine-3'-phosphorothioate
  modified_base 3: mod_base = OTHER; note = 2'-O-methylguanosine-3'-phosphate
  modified_base 4: mod_base = OTHER; note = 2'-O-methylguanosine-3'-phosphate
  modified_base 5: mod_base = OTHER; note = 2'-O-methyladenosine-3'-phosphate
  modified_base 6: mod_base = OTHER; note = 2'-O-methyluridine-3'-phosphate
  modified_base 7: mod_base = OTHER; note = 2'-fluorouridine-3'-phosphate
  modified_base 8: mod_base = OTHER; note = 2'-O-methyluridine-3'-phosphate
  modified_base 9: mod_base = OTHER; note = 2'-fluoroguanosine-3'-phosphate
  modified_base 10: mod_base = OTHER; note = 2'-fluoroguanosine-3'-phosphate
  modified_base 11: mod_base = OTHER; note = 2'-fluoroguanosine-3'-phosphate
  modified_base 12: mod_base = OTHER; note = 2'-O-methyluridine-3'-phosphate
  modified_base 13: mod_base = OTHER; note = 2'-O-methyluridine-3'-phosphate
  modified_base 14: mod_base = OTHER; note = 2'-O-methyluridine-3'-phosphate
  modified_base 15: mod_base = OTHER; note = 2'-O-methyluridine-3'-phosphate
  modified_base 16: mod_base = OTHER; note = 2'-O-methylcytidine-3'-phosphate
  modified_base 17: mod_base = OTHER; note = 2'-O-methyluridine-3'-phosphate
  modified_base 18: mod_base = OTHER; note = 2'-O-methyladenosine-3'-phosphate
  modified_base 19: mod_base = OTHER; note = 2'-O-methyluridine-3'-phosphate
  modified_base 20: mod_base = OTHER; note = 2'-O-methyladenosine-3'-phosphate
  modified_base 21: mod_base = OTHER; note = 2'-O-methyluridine-3'-phosphate N-[tris(GalNAc-alkyl)-amidodecanoyl)]-4-hydroxyprolinol (Hyp-(GalNAc-alkyl)3)
gaggatttgggttttctatat

SEQ ID NO: 1285 - RNA, 21 nt, synthetic construct
  misc_feature 1..21: note = Description of Artificial Sequence: Synthetic oligonucleotide
  source 1..21: mol_type = other RNA
  modified_base 1: mod_base = OTHER; note = 2'-O-methylguanosine-3'-phosphorothioate
  modified_base 2: mod_base = OTHER; note = 2'-O-methylcytidine-3'-phosphorothioate
  modified_base 3: mod_base = OTHER; note = 2'-O-methyladenosine-3'-phosphate
  modified_base 4: mod_base = OTHER; note = 2'-O-methyladenosine-3'-phosphate
  modified_base 5: mod_base = OTHER; note = 2'-O-methylguanosine-3'-phosphate
  modified_base 6: mod_base = OTHER; note = 2'-O-methylcytidine-3'-phosphate
  modified_base 7: mod_base = OTHER; note = 2'-fluorocytidine-3'-phosphate
  modified_base 8: mod_base = OTHER; note = 2'-O-methyladenosine-3'-phosphate
  modified_base 9: mod_base = OTHER; note = 2'-fluoroguanosine-3'-phosphate
  modified_base 10: mod_base = OTHER; note = 2'-fluoroguanosine-3'-phosphate
  modified_base 11: mod_base = OTHER; note = 2'-fluoroadenosine-3'-phosphate
  modified_base 12: mod_base = OTHER; note = 2'-O-methylcytidine-3'-phosphate
  modified_base 13: mod_base = OTHER; note = 2'-O-methyladenosine-3'-phosphate
  modified_base 14: mod_base = OTHER; note = 2'-O-methylcytidine-3'-phosphate
  modified_base 15: mod_base = OTHER; note = 2'-O-methyladenosine-3'-phosphate
  modified_base 16: mod_base = OTHER; note = 2'-O-methylcytidine-3'-phosphate
  modified_base 17: mod_base = OTHER; note = 2'-O-methylcytidine-3'-phosphate
  modified_base 18: mod_base = OTHER; note = 2'-O-methyladenosine-3'-phosphate
  modified_base 19: mod_base = OTHER; note = 2'-O-methyluridine-3'-phosphate
  modified_base 20: mod_base = OTHER; note = 2'-O-methylcytidine-3'-phosphate
  modified_base 21: mod_base = OTHER; note = 2'-O-methyluridine-3'-phosphate N-[tris(GalNAc-alkyl)-amidodecanoyl)]-4-hydroxyprolinol (Hyp-(GalNAc-alkyl)3)
gcaagccaggacacaccatct

SEQ ID NO: 1286 - RNA, 21 nt, synthetic construct
  misc_feature 1..21: note = Description of Artificial Sequence: Synthetic oligonucleotide
  source 1..21: mol_type = other RNA
  modified_base 1: mod_base = OTHER; note = 2'-O-methylcytidine-3'-phosphorothioate
  modified_base 2: mod_base = OTHER; note = 2'-O-methyluridine-3'-phosphorothioate
  modified_base 3: mod_base = OTHER; note = 2'-O-methyluridine-3'-phosphate
  modified_base 4: mod_base = OTHER; note = 2'-O-methylcytidine-3'-phosphate
  modified_base 5: mod_base = OTHER; note = 2'-O-methyluridine-3'-phosphate
  modified_base 6: mod_base = OTHER; note = 2'-O-methylcytidine-3'-phosphate
  modified_base 7: mod_base = OTHER; note = 2'-fluorouridine-3'-phosphate
  modified_base 8: mod_base = OTHER; note = 2'-O-methylcytidine-3'-phosphate
  modified_base 9: mod_base = OTHER; note = 2'-fluorocytidine-3'-phosphate
  modified_base 10: mod_base = OTHER; note = 2'-fluorouridine-3'-phosphate
  modified_base 11: mod_base = OTHER; note = 2'-fluoroguanosine-3'-phosphate
  modified_base 12: mod_base = OTHER; note = 2'-O-methylcytidine-3'-phosphate
  modified_base 13: mod_base = OTHER; note = 2'-O-methylcytidine-3'-phosphate
  modified_base 14: mod_base = OTHER; note = 2'-O-methyluridine-3'-phosphate
  modified_base 15: mod_base = OTHER; note = 2'-O-methyluridine-3'-phosphate
  modified_base 16: mod_base = OTHER; note = 2'-O-methylcytidine-3'-phosphate
  modified_base 17: mod_base = OTHER; note = 2'-O-methylcytidine-3'-phosphate
  modified_base 18: mod_base = OTHER; note = 2'-O-methyladenosine-3'-phosphate
  modified_base 19: mod_base = OTHER; note = 2'-O-methyladenosine-3'-phosphate
  modified_base 20: mod_base = OTHER; note = 2'-O-methylcytidine-3'-phosphate
  modified_base 21: mod_base = OTHER; note = 2'-O-methyluridine-3'-phosphate N-[tris(GalNAc-alkyl)-amidodecanoyl)]-4-hydroxyprolinol (Hyp-(GalNAc-alkyl)3)
cttctctcctgccttccaact

SEQ ID NO: 1287 - RNA, 21 nt, synthetic construct
  misc_feature 1..21: note = Description of Artificial Sequence: Synthetic oligonucleotide
  source 1..21: mol_type = other RNA
  modified_base 1: mod_base = OTHER; note = 2'-O-methylcytidine-3'-phosphorothioate
  modified_base 2: mod_base = OTHER; note = 2'-O-methyluridine-3'-phosphorothioate
  modified_base 3: mod_base = OTHER; note = 2'-O-methyluridine-3'-phosphate
  modified_base 4: mod_base = OTHER; note = 2'-O-methylguanosine-3'-phosphate
  modified_base 5: mod_base = OTHER; note = 2'-O-methylguanosine-3'-phosphate
  modified_base 6: mod_base = OTHER; note = 2'-O-methylguanosine-3'-phosphate
  modified_base 7: mod_base = OTHER; note = 2'-fluorocytidine-3'-phosphate
  modified_base 8: mod_base = OTHER; note = 2'-O-methylcytidine-3'-phosphate
  modified_base 9: mod_base = OTHER; note = 2'-fluorouridine-3'-phosphate
  modified_base 10: mod_base = OTHER; note = 2'-fluorocytidine-3'-phosphate
  modified_base 11: mod_base = OTHER; note = 2'-fluorouridine-3'-phosphate
  modified_base 12: mod_base = OTHER; note = 2'-O-methyluridine-3'-phosphate
  modified_base 13: mod_base = OTHER; note = 2'-O-methylguanosine-3'-phosphate
  modified_base 14: mod_base = OTHER; note = 2'-O-methyluridine-3'-phosphate
  modified_base 15: mod_base = OTHER; note = 2'-O-methylcytidine-3'-phosphate
  modified_base 16: mod_base = OTHER; note = 2'-O-methyluridine-3'-phosphate
  modified_base 17: mod_base = OTHER; note = 2'-O-methylguanosine-3'-phosphate
  modified_base 18: mod_base = OTHER; note = 2'-O-methylguanosine-3'-phosphate
  modified_base 19: mod_base = OTHER; note = 2'-O-methyladenosine-3'-phosphate
  modified_base 20: mod_base = OTHER; note = 2'-O-methylguanosine-3'-phosphate
  modified_base 21: mod_base = OTHER; note = 2'-O-methyluridine-3'-phosphate N-[tris(GalNAc-alkyl)-amidodecanoyl)]-4-hydroxyprolinol (Hyp-(GalNAc-alkyl)3)
cttgggcctcttgtctggagt

SEQ ID NO: 1288 - RNA, 21 nt, synthetic construct
  misc_feature 1..21: note = Description of Artificial Sequence: Synthetic oligonucleotide
  source 1..21: mol_type = other RNA
  modified_base 1: mod_base = OTHER; note = 2'-O-methyladenosine-3'-phosphorothioate
  modified_base 2: mod_base = OTHER; note = 2'-O-methylguanosine-3'-phosphorothioate
  modified_base 3: mod_base = OTHER; note = 2'-O-methyladenosine-3'-phosphate
  modified_base 4: mod_base = OTHER; note = 2'-O-methylguanosine-3'-phosphate
  modified_base 5: mod_base = OTHER; note = 2'-O-methyladenosine-3'-phosphate
  modified_base 6: mod_base = OTHER; note = 2'-O-methyluridine-3'-phosphate
  modified_base 7: mod_base = OTHER; note = 2'-fluorocytidine-3'-phosphate
  modified_base 8: mod_base = OTHER; note = 2'-O-methyladenosine-3'-phosphate
  modified_base 9: mod_base = OTHER; note = 2'-fluoroadenosine-3'-phosphate
  modified_base 10: mod_base = OTHER; note = 2'-fluoroadenosine-3'-phosphate
  modified_base 11: mod_base = OTHER; note = 2'-fluoroguanosine-3'-phosphate
  modified_base 12: mod_base = OTHER; note = 2'-O-methylguanosine-3'-phosphate
  modified_base 13: mod_base = OTHER; note = 2'-O-methylcytidine-3'-phosphate
  modified_base 14: mod_base = OTHER; note = 2'-O-methylguanosine-3'-phosphate
  modified_base 15: mod_base = OTHER; note = 2'-O-methylguanosine-3'-phosphate
  modified_base 16: mod_base = OTHER; note = 2'-O-methylcytidine-3'-phosphate
  modified_base 17: mod_base = OTHER; note = 2'-O-methyluridine-3'-phosphate
  modified_base 18: mod_base = OTHER; note = 2'-O-methylcytidine-3'-phosphate
  modified_base 19: mod_base = OTHER; note = 2'-O-methylcytidine-3'-phosphate
  modified_base 20: mod_base = OTHER; note = 2'-O-methyluridine-3'-phosphate
  modified_base 21: mod_base = OTHER; note = 2'-O-methyluridine-3'-phosphate N-[tris(GalNAc-alkyl)-amidodecanoyl)]-4-hydroxyprolinol (Hyp-(GalNAc-alkyl)3)
agagatcaaaggcggctcctt

SEQ ID NO: 1289 - RNA, 21 nt, synthetic construct
  misc_feature 1..21: note = Description of Artificial Sequence: Synthetic oligonucleotide
  source 1..21: mol_type = other RNA
  modified_base 1: mod_base = OTHER; note = 2'-O-methyladenosine-3'-phosphorothioate
  modified_base 2: mod_base = OTHER; note = 2'-O-methylcytidine-3'-phosphorothioate
  modified_base 3: mod_base = OTHER; note = 2'-O-methyluridine-3'-phosphate
  modified_base 4: mod_base = OTHER; note = 2'-O-methylguanosine-3'-phosphate
  modified_base 5: mod_base = OTHER; note = 2'-O-methylguanosine-3'-phosphate
  modified_base 6: mod_base = OTHER; note = 2'-O-methyladenosine-3'-phosphate
  modified_base 7: mod_base = OTHER; note = 2'-fluoroguanosine-3'-phosphate
  modified_base 8: mod_base = OTHER; note = 2'-O-methyluridine-3'-phosphate
  modified_base 9: mod_base = OTHER; note = 2'-fluoroadenosine-3'-phosphate
  modified_base 10: mod_base = OTHER; note = 2'-fluorocytidine-3'-phosphate
  modified_base 11: mod_base = OTHER; note = 2'-fluoroguanosine-3'-phosphate
  modified_base 12: mod_base = OTHER; note = 2'-O-methyluridine-3'-phosphate
  modified_base 13: mod_base = OTHER; note = 2'-O-methylguanosine-3'-phosphate
  modified_base 14: mod_base = OTHER; note = 2'-O-methyluridine-3'-phosphate
  modified_base 15: mod_base = OTHER; note = 2'-O-methylguanosine-3'-phosphate
  modified_base 16: mod_base = OTHER; note = 2'-O-methyluridine-3'-phosphate
  modified_base 17: mod_base = OTHER; note = 2'-O-methylcytidine-3'-phosphate
  modified_base 18: mod_base = OTHER; note = 2'-O-methylcytidine-3'-phosphate
  modified_base 19: mod_base = OTHER; note = 2'-O-methyluridine-3'-phosphate
  modified_base 20: mod_base = OTHER; note = 2'-O-methyluridine-3'-phosphate
  modified_base 21: mod_base = OTHER; note = 2'-O-methyluridine-3'-phosphate N-[tris(GalNAc-alkyl)-amidodecanoyl)]-4-hydroxyprolinol (Hyp-(GalNAc-alkyl)3)
actggagtacgtgtgtccttt

SEQ ID NO: 1290 - RNA, 21 nt, synthetic construct
  misc_feature 1..21: note = Description of Artificial Sequence: Synthetic oligonucleotide
  source 1..21: mol_type = other RNA
  modified_base 1: mod_base = OTHER; note = 2'-O-methylcytidine-3'-phosphorothioate
  modified_base 2: mod_base = OTHER; note = 2'-O-methylcytidine-3'-phosphorothioate
  modified_base 3: mod_base = OTHER; note = 2'-O-methyluridine-3'-phosphate
  modified_base 4: mod_base = OTHER; note = 2'-O-methylguanosine-3'-phosphate
  modified_base 5: mod_base = OTHER; note = 2'-O-methyladenosine-3'-phosphate
  modified_base 6: mod_base = OTHER; note = 2'-O-methyladenosine-3'-phosphate
  modified_base 7: mod_base = OTHER; note = 2'-fluoroguanosine-3'-phosphate
  modified_base 8: mod_base = OTHER; note = 2'-O-methyladenosine-3'-phosphate
  modified_base 9: mod_base = OTHER; note = 2'-fluorocytidine-3'-phosphate
  modified_base 10: mod_base = OTHER; note = 2'-fluorouridine-3'-phosphate
  modified_base 11: mod_base = OTHER; note = 2'-fluorocytidine-3'-phosphate
  modified_base 12: mod_base = OTHER; note = 2'-O-methyladenosine-3'-phosphate
  modified_base 13: mod_base = OTHER; note = 2'-O-methyladenosine-3'-phosphate
  modified_base 14: mod_base = OTHER; note = 2'-O-methylguanosine-3'-phosphate
  modified_base 15: mod_base = OTHER; note = 2'-O-methyladenosine-3'-phosphate
  modified_base 16: mod_base = OTHER; note = 2'-O-methylcytidine-3'-phosphate
  modified_base 17: mod_base = OTHER; note = 2'-O-methylcytidine-3'-phosphate
  modified_base 18: mod_base = OTHER; note = 2'-O-methyladenosine-3'-phosphate
  modified_base 19: mod_base = OTHER; note = 2'-O-methyladenosine-3'-phosphate
  modified_base 20: mod_base = OTHER; note = 2'-O-methyladenosine-3'-phosphate
  modified_base 21: mod_base = OTHER; note = 2'-O-methyluridine-3'-phosphate N-[tris(GalNAc-alkyl)-amidodecanoyl)]-4-hydroxyprolinol (Hyp-(GalNAc-alkyl)3)
cctgaagactcaagaccaaat

SEQ ID NO: 1291 - RNA, 21 nt, synthetic construct
  misc_feature 1..21: note = Description of Artificial Sequence: Synthetic oligonucleotide
  source 1..21: mol_type = other RNA
  modified_base 1: mod_base = OTHER; note = 2'-O-methylguanosine-3'-phosphorothioate
  modified_base 2: mod_base = OTHER; note = 2'-O-methyladenosine-3'-phosphorothioate
  modified_base 3: mod_base = OTHER; note = 2'-O-methylcytidine-3'-phosphate
  modified_base 4: mod_base = OTHER; note = 2'-O-methyluridine-3'-phosphate
  modified_base 5: mod_base = OTHER; note = 2'-O-methylguanosine-3'-phosphate
  modified_base 6: mod_base = OTHER; note = 2'-O-methyluridine-3'-phosphate
  modified_base 7: mod_base = OTHER; note = 2'-fluorocytidine-3'-phosphate
  modified_base 8: mod_base = OTHER; note = 2'-O-methyladenosine-3'-phosphate
  modified_base 9: mod_base = OTHER; note = 2'-fluoroguanosine-3'-phosphate
  modified_base 10: mod_base = OTHER; note = 2'-fluoroguanosine-3'-phosphate
  modified_base 11: mod_base = OTHER; note = 2'-fluoroadenosine-3'-phosphate
  modified_base 12: mod_base = OTHER; note = 2'-O-methyladenosine-3'-phosphate
  modified_base 13: mod_base = OTHER; note = 2'-O-methylguanosine-3'-phosphate
  modified_base 14: mod_base = OTHER; note = 2'-O-methylguanosine-3'-phosphate
  modified_base 15: mod_base = OTHER; note = 2'-O-methylcytidine-3'-phosphate
  modified_base 16: mod_base = OTHER; note = 2'-O-methyladenosine-3'-phosphate
  modified_base 17: mod_base = OTHER; note = 2'-O-methylguanosine-3'-phosphate
  modified_base 18: mod_base = OTHER; note = 2'-O-methyladenosine-3'-phosphate
  modified_base 19: mod_base = OTHER; note = 2'-O-methylguanosine-3'-phosphate
  modified_base 20: mod_base = OTHER; note = 2'-O-methyluridine-3'-phosphate
  modified_base 21: mod_base = OTHER; note = 2'-O-methyluridine-3'-phosphate N-[tris(GalNAc-alkyl)-amidodecanoyl)]-4-hydroxyprolinol (Hyp-(GalNAc-alkyl)3)
gactgtcaggaaggcagagtt

SEQ ID NO: 1292 - RNA, 21 nt, synthetic construct
  misc_feature 1..21: note = Description of Artificial Sequence: Synthetic oligonucleotide
  source 1..21: mol_type = other RNA
  modified_base 1: mod_base = OTHER; note = 2'-O-methyluridine-3'-phosphorothioate
  modified_base 2: mod_base = OTHER; note = 2'-O-methylguanosine-3'-phosphorothioate
  modified_base 3: mod_base = OTHER; note = 2'-O-methylguanosine-3'-phosphate
  modified_base 4: mod_base = OTHER; note = 2'-O-methylcytidine-3'-phosphate
  modified_base 5: mod_base = OTHER; note = 2'-O-methyladenosine-3'-phosphate
  modified_base 6: mod_base = OTHER; note = 2'-O-methylcytidine-3'-phosphate
  modified_base 7: mod_base = OTHER; note = 2'-fluoroadenosine-3'-phosphate
  modified_base 8: mod_base = OTHER; note = 2'-O-methyladenosine-3'-phosphate
  modified_base 9: mod_base = OTHER; note = 2'-fluoroguanosine-3'-phosphate
  modified_base 10: mod_base = OTHER; note = 2'-fluoroguanosine-3'-phosphate
  modified_base 11: mod_base = OTHER; note = 2'-fluoroadenosine-3'-phosphate
  modified_base 12: mod_base = OTHER; note = 2'-O-methyladenosine-3'-phosphate
  modified_base 13: mod_base = OTHER; note = 2'-O-methylguanosine-3'-phosphate
  modified_base 14: mod_base = OTHER; note = 2'-O-methylguanosine-3'-phosphate
  modified_base 15: mod_base = OTHER; note = 2'-O-methyluridine-3'-phosphate
  modified_base 16: mod_base = OTHER; note = 2'-O-methylguanosine-3'-phosphate
  modified_base 17: mod_base = OTHER; note = 2'-O-methylguanosine-3'-phosphate
  modified_base 18: mod_base = OTHER; note = 2'-O-methylguanosine-3'-phosphate
  modified_base 19: mod_base = OTHER; note = 2'-O-methylcytidine-3'-phosphate
  modified_base 20: mod_base = OTHER; note = 2'-O-methyladenosine-3'-phosphate
  modified_base 21: mod_base = OTHER; note = 2'-O-methyluridine-3'-phosphate N-[tris(GalNAc-alkyl)-amidodecanoyl)]-4-hydroxyprolinol (Hyp-(GalNAc-alkyl)3)
tggcacaaggaaggtgggcat

SEQ ID NO: 1293 - RNA, 21 nt, synthetic construct
  misc_feature 1..21: note = Description of Artificial Sequence: Synthetic oligonucleotide
  source 1..21: mol_type = other RNA
  modified_base 1: mod_base = OTHER; note = 2'-O-methylcytidine-3'-phosphorothioate
  modified_base 2: mod_base = OTHER; note = 2'-O-methylcytidine-3'-phosphorothioate
  modified_base 3: mod_base = OTHER; note = 2'-O-methylguanosine-3'-phosphate
  modified_base 4: mod_base = OTHER; note = 2'-O-methylcytidine-3'-phosphate
  modified_base 5: mod_base = OTHER; note = 2'-O-methylcytidine-3'-phosphate
  modified_base 6: mod_base = OTHER; note = 2'-O-methyluridine-3'-phosphate
  modified_base 7: mod_base = OTHER; note = 2'-fluorouridine-3'-phosphate
  modified_base 8: mod_base = OTHER; note = 2'-O-methylguanosine-3'-phosphate
  modified_base 9: mod_base = OTHER; note = 2'-fluoroadenosine-3'-phosphate
  modified_base 10: mod_base = OTHER; note = 2'-fluoroadenosine-3'-phosphate
  modified_base 11: mod_base = OTHER; note = 2'-fluoroguanosine-3'-phosphate
  modified_base 12: mod_base = OTHER; note = 2'-O-methyladenosine-3'-phosphate
  modified_base 13: mod_base = OTHER; note = 2'-O-methylcytidine-3'-phosphate
  modified_base 14: mod_base = OTHER; note = 2'-O-methyladenosine-3'-phosphate
  modified_base 15: mod_base = OTHER; note = 2'-O-methylguanosine-3'-phosphate
  modified_base 16: mod_base = OTHER; note = 2'-O-methylcytidine-3'-phosphate
  modified_base 17: mod_base = OTHER; note = 2'-O-methylguanosine-3'-phosphate
  modified_base 18: mod_base = OTHER; note = 2'-O-methyluridine-3'-phosphate
  modified_base 19: mod_base = OTHER; note = 2'-O-methylcytidine-3'-phosphate
  modified_base 20: mod_base = OTHER; note = 2'-O-methyladenosine-3'-phosphate
  modified_base 21: mod_base = OTHER; note = 2'-O-methyluridine-3'-phosphate N-[tris(GalNAc-alkyl)-amidodecanoyl)]-4-hydroxyprolinol (Hyp-(GalNAc-alkyl)3)
ccgccttgaagacagcgtcat

SEQ ID NO: 1294 - RNA, 21 nt, synthetic construct
  misc_feature 1..21: note = Description of Artificial Sequence: Synthetic oligonucleotide
  source 1..21: mol_type = other RNA
  modified_base 1: mod_base = OTHER; note = 2'-O-methylcytidine-3'-phosphorothioate
  modified_base 2: mod_base = OTHER; note = 2'-O-methyluridine-3'-phosphorothioate
  modified_base 3: mod_base = OTHER; note = 2'-O-methylguanosine-3'-phosphate
  modified_base 4: mod_base = OTHER; note = 2'-O-methyladenosine-3'-phosphate
  modified_base 5: mod_base = OTHER; note = 2'-O-methyladenosine-3'-phosphate
  modified_base 6: mod_base = OTHER; note = 2'-O-methylguanosine-3'-phosphate
  modified_base 7: mod_base = OTHER; note = 2'-fluorocytidine-3'-phosphate
  modified_base 8: mod_base = OTHER; note = 2'-O-methyladenosine-3'-phosphate
  modified_base 9: mod_base = OTHER; note = 2'-fluoroguanosine-3'-phosphate
  modified_base 10: mod_base = OTHER; note = 2'-fluoroadenosine-3'-phosphate
  modified_base 11: mod_base = OTHER; note = 2'-fluorocytidine-3'-phosphate
  modified_base 12: mod_base = OTHER; note = 2'-O-methyladenosine-3'-phosphate
  modified_base 13: mod_base = OTHER; note = 2'-O-methylguanosine-3'-phosphate
  modified_base 14: mod_base = OTHER; note = 2'-O-methylcytidine-3'-phosphate
  modified_base 15: mod_base = OTHER; note = 2'-O-methyladenosine-3'-phosphate
  modified_base 16: mod_base = OTHER; note = 2'-O-methylguanosine-3'-phosphate
  modified_base 17: mod_base = OTHER; note = 2'-O-methyluridine-3'-phosphate
  modified_base 18: mod_base = OTHER; note = 2'-O-methyladenosine-3'-phosphate
  modified_base 19: mod_base = OTHER; note = 2'-O-methyladenosine-3'-phosphate
  modified_base 20: mod_base = OTHER; note = 2'-O-methyluridine-3'-phosphate
  modified_base 21: mod_base = OTHER; note = 2'-O-methyluridine-3'-phosphate N-[tris(GalNAc-alkyl)-amidodecanoyl)]-4-hydroxyprolinol (Hyp-(GalNAc-alkyl)3)
ctgaagcagacagcagtaatt

SEQ ID NO: 1295 - RNA, 21 nt, synthetic construct
  misc_feature 1..21: note = Description of Artificial Sequence: Synthetic oligonucleotide
  source 1..21: mol_type = other RNA
  modified_base 1: mod_base = OTHER; note = 2'-O-methyluridine-3'-phosphorothioate
  modified_base 2: mod_base = OTHER; note = 2'-O-methylguanosine-3'-phosphorothioate
  modified_base 3: mod_base = OTHER; note = 2'-O-methylcytidine-3'-phosphate
  modified_base 4: mod_base = OTHER; note = 2'-O-methyladenosine-3'-phosphate
  modified_base 5: mod_base = OTHER; note = 2'-O-methylguanosine-3'-phosphate
  modified_base 6: mod_base = OTHER; note = 2'-O-methyladenosine-3'-phosphate
  modified_base 7: mod_base = OTHER; note = 2'-fluorocytidine-3'-phosphate
  modified_base 8: mod_base = OTHER; note = 2'-O-methyluridine-3'-phosphate
  modified_base 9: mod_base = OTHER; note = 2'-fluoroguanosine-3'-phosphate
  modified_base 10: mod_base = OTHER; note = 2'-fluoroguanosine-3'-phosphate
  modified_base 11: mod_base = OTHER; note = 2'-fluoroguanosine-3'-phosphate
  modified_base 12: mod_base = OTHER; note = 2'-O-methyluridine-3'-phosphate
  modified_base 13: mod_base = OTHER; note = 2'-O-methylcytidine-3'-phosphate
  modified_base 14: mod_base = OTHER; note = 2'-O-methyladenosine-3'-phosphate
  modified_base 15: mod_base = OTHER; note = 2'-O-methylcytidine-3'-phosphate
  modified_base 16: mod_base = OTHER; note = 2'-O-methylguanosine-3'-phosphate
  modified_base 17: mod_base = OTHER; note = 2'-O-methyladenosine-3'-phosphate
  modified_base 18: mod_base = OTHER; note = 2'-O-methyladenosine-3'-phosphate
  modified_base 19: mod_base = OTHER; note = 2'-O-methylguanosine-3'-phosphate
  modified_base 20: mod_base = OTHER; note = 2'-O-methylcytidine-3'-phosphate
  modified_base 21: mod_base = OTHER; note = 2'-O-methyluridine-3'-phosphate N-[tris(GalNAc-alkyl)-amidodecanoyl)]-4-hydroxyprolinol (Hyp-(GalNAc-alkyl)3)
tgcagactgggtcacgaagct

SEQ ID NO: 1296 - RNA, 21 nt, synthetic construct
  misc_feature 1..21: note = Description of Artificial Sequence: Synthetic oligonucleotide
  source 1..21: mol_type = other RNA
  modified_base 1: mod_base = OTHER; note = 2'-O-methyluridine-3'-phosphorothioate
  modified_base 2: mod_base = OTHER; note = 2'-O-methyladenosine-3'-phosphorothioate
  modified_base 3: mod_base = OTHER; note = 2'-O-methyladenosine-3'-phosphate
  modified_base 4: mod_base = OTHER; note = 2'-O-methylcytidine-3'-phosphate
  modified_base 5: mod_base = OTHER; note = 2'-O-methyladenosine-3'-phosphate
  modified_base 6: mod_base = OTHER; note = 2'-O-methylcytidine-3'-phosphate
  modified_base 7: mod_base = OTHER; note = 2'-fluorocytidine-3'-phosphate
  modified_base 8: mod_base = OTHER; note = 2'-O-methyladenosine-3'-phosphate
  modified_base 9: mod_base = OTHER; note = 2'-fluoroadenosine-3'-phosphate
  modified_base 10: mod_base = OTHER; note = 2'-fluoroguanosine-3'-phosphate
  modified_base 11: mod_base = OTHER; note = 2'-fluoroadenosine-3'-phosphate
  modified_base 12: mod_base = OTHER; note = 2'-O-methyladenosine-3'-phosphate
  modified_base 13: mod_base = OTHER; note = 2'-O-methylguanosine-3'-phosphate
  modified_base 14: mod_base = OTHER; note = 2'-O-methylguanosine-3'-phosphate
  modified_base 15: mod_base = OTHER; note = 2'-O-methylcytidine-3'-phosphate
  modified_base 16: mod_base = OTHER; note = 2'-O-methylcytidine-3'-phosphate
  modified_base 17: mod_base = OTHER; note = 2'-O-methylcytidine-3'-phosphate
  modified_base 18: mod_base = OTHER; note = 2'-O-methyluridine-3'-phosphate
  modified_base 19: mod_base = OTHER; note = 2'-O-methylcytidine-3'-phosphate
  modified_base 20: mod_base = OTHER; note = 2'-O-methylcytidine-3'-phosphate
  modified_base 21: mod_base = OTHER; note = 2'-O-methyluridine-3'-phosphate N-[tris(GalNAc-alkyl)-amidodecanoyl)]-4-hydroxyprolinol (Hyp-(GalNAc-alkyl)3)
taacaccaagaaggccctcct

SEQ ID NO: 1297 - RNA, 21 nt, synthetic construct
  misc_feature 1..21: note = Description of Artificial Sequence: Synthetic oligonucleotide
  source 1..21: mol_type = other RNA
  modified_base 1: mod_base = OTHER; note = 2'-O-methyladenosine-3'-phosphorothioate
  modified_base 2: mod_base = OTHER; note = 2'-O-methyluridine-3'-phosphorothioate
  modified_base 3: mod_base = OTHER; note = 2'-O-methylguanosine-3'-phosphate
  modified_base 4: mod_base = OTHER; note = 2'-O-methyladenosine-3'-phosphate
  modified_base 5: mod_base = OTHER; note = 2'-O-methylguanosine-3'-phosphate
  modified_base 6: mod_base = OTHER; note = 2'-O-methylcytidine-3'-phosphate
  modified_base 7: mod_base = OTHER; note = 2'-fluorouridine-3'-phosphate
  modified_base 8: mod_base = OTHER; note = 2'-O-methylguanosine-3'-phosphate
  modified_base 9: mod_base = OTHER; note = 2'-fluoroguanosine-3'-phosphate
  modified_base 10: mod_base = OTHER; note = 2'-fluorocytidine-3'-phosphate
  modified_base 11: mod_base = OTHER; note = 2'-fluorocytidine-3'-phosphate
  modified_base 12: mod_base = OTHER; note = 2'-O-methyladenosine-3'-phosphate
  modified_base 13: mod_base = OTHER; note = 2'-O-methylguanosine-3'-phosphate
  modified_base 14: mod_base = OTHER; note = 2'-O-methyladenosine-3'-phosphate
  modified_base 15: mod_base = OTHER; note = 2'-O-methyluridine-3'-phosphate
  modified_base 16: mod_base = OTHER; note = 2'-O-methylguanosine-3'-phosphate
  modified_base 17: mod_base = OTHER; note = 2'-O-methyladenosine-3'-phosphate
  modified_base 18: mod_base = OTHER; note = 2'-O-methylcytidine-3'-phosphate
  modified_base 19: mod_base = OTHER; note = 2'-O-methylguanosine-3'-phosphate
  modified_base 20: mod_base = OTHER; note = 2'-O-methyluridine-3'-phosphate
  modified_base 21: mod_base = OTHER; note = 2'-O-methyluridine-3'-phosphate N-[tris(GalNAc-alkyl)-amidodecanoyl)]-4-hydroxyprolinol (Hyp-(GalNAc-alkyl)3)
atgagctggccagatgacgtt

SEQ ID NO: 1298 - RNA, 21 nt, synthetic construct
  misc_feature 1..21: note = Description of Artificial Sequence: Synthetic oligonucleotide
  source 1..21: mol_type = other RNA
  modified_base 1: mod_base = OTHER; note = 2'-O-methyladenosine-3'-phosphorothioate
  modified_base 2: mod_base = OTHER; note = 2'-O-methylcytidine-3'-phosphorothioate
  modified_base 3: mod_base = OTHER; note = 2'-O-methyluridine-3'-phosphate
  modified_base 4: mod_base = OTHER; note = 2'-O-methyluridine-3'-phosphate
  modified_base 5: mod_base = OTHER; note = 2'-O-methylguanosine-3'-phosphate
  modified_base 6: mod_base = OTHER; note = 2'-O-methylcytidine-3'-phosphate
  modified_base 7: mod_base = OTHER; note = 2'-fluorouridine-3'-phosphate
  modified_base 8: mod_base = OTHER; note = 2'-O-methyladenosine-3'-phosphate
  modified_base 9: mod_base = OTHER; note = 2'-fluorouridine-3'-phosphate
  modified_base 10: mod_base = OTHER; note = 2'-fluoroadenosine-3'-phosphate
  modified_base 11: mod_base = OTHER; note = 2'-fluorocytidine-3'-phosphate
  modified_base 12: mod_base = OTHER; note = 2'-O-methyladenosine-3'-phosphate
  modified_base 13: mod_base = OTHER; note = 2'-O-methyluridine-3'-phosphate
  modified_base 14: mod_base = OTHER; note = 2'-O-methyluridine-3'-phosphate
  modified_base 15: mod_base = OTHER; note = 2'-O-methylguanosine-3'-phosphate
  modified_base 16: mod_base = OTHER; note = 2'-O-methylguanosine-3'-phosphate
  modified_base 17: mod_base = OTHER; note = 2'-O-methylcytidine-3'-phosphate
  modified_base 18: mod_base = OTHER; note = 2'-O-methyladenosine-3'-phosphate
  modified_base 19: mod_base = OTHER; note = 2'-O-methyladenosine-3'-phosphate
  modified_base 20: mod_base = OTHER; note = 2'-O-methylguanosine-3'-phosphate
  modified_base 21: mod_base = OTHER; note = 2'-O-methyluridine-3'-phosphate N-[tris(GalNAc-alkyl)-amidodecanoyl)]-4-hydroxyprolinol (Hyp-(GalNAc-alkyl)3)
acttgctatacattggcaagt

SEQ ID NO: 1299 - RNA, 21 nt, synthetic construct
  misc_feature 1..21: note = Description of Artificial Sequence: Synthetic oligonucleotide
  source 1..21: mol_type = other RNA
  modified_base 1: mod_base = OTHER; note = 2'-O-methyluridine-3'-phosphorothioate
  modified_base 2: mod_base = OTHER; note = 2'-O-methylcytidine-3'-phosphorothioate
  modified_base 3: mod_base = OTHER; note = 2'-O-methyluridine-3'-phosphate
  modified_base 4: mod_base = OTHER; note = 2'-O-methyladenosine-3'-phosphate
  modified_base 5: mod_base = OTHER; note = 2'-O-methylcytidine-3'-phosphate
  modified_base 6: mod_base = OTHER; note = 2'-O-methylcytidine-3'-phosphate
  modified_base 7: mod_base = OTHER; note = 2'-fluoroadenosine-3'-phosphate
  modified_base 8: mod_base = OTHER; note = 2'-O-methyladenosine-3'-phosphate
  modified_base 9: mod_base = OTHER; note = 2'-fluoroadenosine-3'-phosphate
  modified_base 10: mod_base = OTHER; note = 2'-fluorouridine-3'-phosphate
  modified_base 11: mod_base = OTHER; note = 2'-fluoroguanosine-3'-phosphate
  modified_base 12: mod_base = OTHER; note = 2'-O-methyladenosine-3'-phosphate
  modified_base 13: mod_base = OTHER; note = 2'-O-methyluridine-3'-phosphate
  modified_base 14: mod_base = OTHER; note = 2'-O-methylcytidine-3'-phosphate
  modified_base 15: mod_base = OTHER; note = 2'-O-methylguanosine-3'-phosphate
  modified_base 16: mod_base = OTHER; note = 2'-O-methyladenosine-3'-phosphate
  modified_base 17: mod_base = OTHER; note = 2'-O-methyluridine-3'-phosphate
  modified_base 18: mod_base = OTHER; note = 2'-O-methylguanosine-3'-phosphate
  modified_base 19: mod_base = OTHER; note = 2'-O-methyladenosine-3'-phosphate
  modified_base 20: mod_base = OTHER; note = 2'-O-methyladenosine-3'-phosphate
  modified_base 21: mod_base = OTHER; note = 2'-O-methyluridine-3'-phosphate N-[tris(GalNAc-alkyl)-amidodecanoyl)]-4-hydroxyprolinol (Hyp-(GalNAc-alkyl)3)
tctaccaaatgatcgatgaat

SEQ ID NO: 1300 - RNA, 21 nt, synthetic construct
  misc_feature 1..21: note = Description of Artificial Sequence: Synthetic oligonucleotide
  source 1..21: mol_type = other RNA
  modified_base 1: mod_base = OTHER; note = 2'-O-methylguanosine-3'-phosphorothioate
  modified_base 2: mod_base = OTHER; note = 2'-O-methylguanosine-3'-phosphorothioate
  modified_base 3: mod_base = OTHER; note = 2'-O-methyluridine-3'-phosphate
  modified_base 4: mod_base = OTHER; note = 2'-O-methyluridine-3'-phosphate
  modified_base 5: mod_base = OTHER; note = 2'-O-methyluridine-3'-phosphate
  modified_base 6: mod_base = OTHER; note = 2'-O-methylguanosine-3'-phosphate
  modified_base 7: mod_base = OTHER; note = 2'-fluoroguanosine-3'-phosphate
  modified_base 8: mod_base = OTHER; note = 2'-O-methylguanosine-3'-phosphate
  modified_base 9: mod_base = OTHER; note = 2'-fluoroadenosine-3'-phosphate
  modified_base 10: mod_base = OTHER; note = 2'-fluoroadenosine-3'-phosphate
  modified_base 11: mod_base = OTHER; note = 2'-fluorocytidine-3'-phosphate
  modified_base 12: mod_base = OTHER; note = 2'-O-methyladenosine-3'-phosphate
  modified_base 13: mod_base = OTHER; note = 2'-O-methylcytidine-3'-phosphate
  modified_base 14: mod_base = OTHER; note = 2'-O-methyladenosine-3'-phosphate
  modified_base 15: mod_base = OTHER; note = 2'-O-methylguanosine-3'-phosphate
  modified_base 16: mod_base = OTHER; note = 2'-O-methylguanosine-3'-phosphate
  modified_base 17: mod_base = OTHER; note = 2'-O-methyladenosine-3'-phosphate
  modified_base 18: mod_base = OTHER; note = 2'-O-methyladenosine-3'-phosphate
  modified_base 19: mod_base = OTHER; note = 2'-O-methylguanosine-3'-phosphate
  modified_base 20: mod_base = OTHER; note = 2'-O-methylguanosine-3'-phosphate
  modified_base 21: mod_base = OTHER; note = 2'-O-methyluridine-3'-phosphate N-[tris(GalNAc-alkyl)-amidodecanoyl)]-4-hydroxyprolinol (Hyp-(GalNAc-alkyl)3)
ggtttgggaacacaggaaggt

SEQ ID NO: 1301 - RNA, 21 nt, synthetic construct
  misc_feature 1..21: note = Description of Artificial Sequence: Synthetic oligonucleotide
  source 1..21: mol_type = other RNA
  modified_base 1: mod_base = OTHER; note = 2'-O-methylcytidine-3'-phosphorothioate
  modified_base 2: mod_base = OTHER; note = 2'-O-methyladenosine-3'-phosphorothioate
  modified_base 3: mod_base = OTHER; note = 2'-O-methyluridine-3'-phosphate
  modified_base 4: mod_base = OTHER; note = 2'-O-methylguanosine-3'-phosphate
  modified_base 5: mod_base = OTHER; note = 2'-O-methylguanosine-3'-phosphate
  modified_base 6: mod_base = OTHER; note = 2'-O-methylcytidine-3'-phosphate
  modified_base 7: mod_base = OTHER; note = 2'-fluoroadenosine-3'-phosphate
  modified_base 8: mod_base = OTHER; note = 2'-O-methylguanosine-3'-phosphate
  modified_base 9: mod_base = OTHER; note = 2'-fluoroguanosine-3'-phosphate
  modified_base 10: mod_base = OTHER; note = 2'-fluorocytidine-3'-phosphate
  modified_base 11: mod_base = OTHER; note = 2'-fluorocytidine-3'-phosphate
  modified_base 12: mod_base = OTHER; note = 2'-O-methyladenosine-3'-phosphate
  modified_base 13: mod_base = OTHER; note = 2'-O-methyladenosine-3'-phosphate
  modified_base 14: mod_base = OTHER; note = 2'-O-methylguanosine-3'-phosphate
  modified_base 15: mod_base = OTHER; note = 2'-O-methyladenosine-3'-phosphate
  modified_base 16: mod_base = OTHER; note = 2'-O-methyluridine-3'-phosphate
  modified_base 17: mod_base = OTHER; note = 2'-O-methylcytidine-3'-phosphate
  modified_base 18: mod_base = OTHER; note = 2'-O-methyluridine-3'-phosphate
  modified_base 19: mod_base = OTHER; note = 2'-O-methylcytidine-3'-phosphate
  modified_base 20: mod_base = OTHER; note = 2'-O-methyladenosine-3'-phosphate
  modified_base 21: mod_base = OTHER; note = 2'-O-methyluridine-3'-phosphate N-[tris(GalNAc-alkyl)-amidodecanoyl)]-4-hydroxyprolinol (Hyp-(GalNAc-alkyl)3)
catggcaggccaagatctcat

SEQ ID NO: 1302 - RNA, 21 nt, synthetic construct
  misc_feature 1..21: note = Description of Artificial Sequence: Synthetic oligonucleotide
  source 1..21: mol_type = other RNA
  modified_base 1: mod_base = OTHER; note = 2'-O-methyladenosine-3'-phosphorothioate
  modified_base 2: mod_base = OTHER; note = 2'-O-methylguanosine-3'-phosphorothioate
  modified_base 3: mod_base = OTHER; note = 2'-O-methylguanosine-3'-phosphate
  modified_base 4: mod_base = OTHER; note = 2'-O-methylguanosine-3'-phosphate
  modified_base 5: mod_base = OTHER; note = 2'-O-methyladenosine-3'-phosphate
  modified_base 6: mod_base = OTHER; note = 2'-O-methylcytidine-3'-phosphate
  modified_base 7: mod_base = OTHER; note = 2'-fluoroadenosine-3'-phosphate
  modified_base 8: mod_base = OTHER; note = 2'-O-methylcytidine-3'-phosphate
  modified_base 9: mod_base = OTHER; note = 2'-fluoroguanosine-3'-phosphate
  modified_base 10: mod_base = OTHER; note = 2'-fluoroadenosine-3'-phosphate
  modified_base 11: mod_base = OTHER; note = 2'-fluoroguanosine-3'-phosphate
  modified_base 12: mod_base = OTHER; note = 2'-O-methyladenosine-3'-phosphate
  modified_base 13: mod_base = OTHER; note = 2'-O-methylguanosine-3'-phosphate
  modified_base 14: mod_base = OTHER; note = 2'-O-methylcytidine-3'-phosphate
  modified_base 15: mod_base = OTHER; note = 2'-O-methyluridine-3'-phosphate
  modified_base 16: mod_base = OTHER; note = 2'-O-methylguanosine-3'-phosphate
  modified_base 17: mod_base = OTHER; note = 2'-O-methyluridine-3'-phosphate
  modified_base 18: mod_base = OTHER; note = 2'-O-methyladenosine-3'-phosphate
  modified_base 19: mod_base = OTHER; note = 2'-O-methyluridine-3'-phosphate
  modified_base 20: mod_base = OTHER; note = 2'-O-methylguanosine-3'-phosphate
  modified_base 21: mod_base = OTHER; note = 2'-O-methyluridine-3'-phosphate N-[tris(GalNAc-alkyl)-amidodecanoyl)]-4-hydroxyprolinol (Hyp-(GalNAc-alkyl)3)
agggacacgagagctgtatgt

SEQ ID NO: 1303 - RNA, 21 nt, synthetic construct
  misc_feature 1..21: note = Description of Artificial Sequence: Synthetic oligonucleotide
  source 1..21: mol_type = other RNA
  modified_base 1: mod_base = OTHER; note = 2'-O-methyladenosine-3'-phosphorothioate
  modified_base 2: mod_base = OTHER; note = 2'-O-methylcytidine-3'-phosphorothioate
  modified_base 3: mod_base = OTHER; note = 2'-O-methyladenosine-3'-phosphate
  modified_base 4: mod_base = OTHER; note = 2'-O-methyladenosine-3'-phosphate
  modified_base 5: mod_base = OTHER; note = 2'-O-methylguanosine-3'-phosphate
  modified_base 6: mod_base = OTHER; note = 2'-O-methylguanosine-3'-phosphate
  modified_base 7: mod_base = OTHER; note = 2'-fluoroadenosine-3'-phosphate
  modified_base 8: mod_base = OTHER; note = 2'-O-methyladenosine-3'-phosphate
  modified_base 9: mod_base = OTHER; note = 2'-fluorocytidine-3'-phosphate
  modified_base 10: mod_base = OTHER; note = 2'-fluoroadenosine-3'-phosphate
  modified_base 11: mod_base = OTHER; note = 2'-fluorocytidine-3'-phosphate
  modified_base 12: mod_base = OTHER; note = 2'-O-methyluridine-3'-phosphate
  modified_base 13: mod_base = OTHER; note = 2'-O-methylcytidine-3'-phosphate
  modified_base 14: mod_base = OTHER; note = 2'-O-methyladenosine-3'-phosphate
  modified_base 15: mod_base = OTHER; note = 2'-O-methyladenosine-3'-phosphate
  modified_base 16: mod_base = OTHER; note = 2'-O-methyluridine-3'-phosphate
  modified_base 17: mod_base = OTHER; note = 2'-O-methylcytidine-3'-phosphate
  modified_base 18: mod_base = OTHER; note = 2'-O-methyladenosine-3'-phosphate
  modified_base 19: mod_base = OTHER; note = 2'-O-methyladenosine-3'-phosphate
  modified_base 20: mod_base = OTHER; note = 2'-O-methylguanosine-3'-phosphate
  modified_base 21: mod_base = OTHER; note = 2'-O-methyluridine-3'-phosphate N-[tris(GalNAc-alkyl)-amidodecanoyl)]-4-hydroxyprolinol (Hyp-(GalNAc-alkyl)3)
acaaggaacactcaatcaagt

SEQ ID NO: 1304 - RNA, 21 nt, synthetic construct
  misc_feature 1..21: note = Description of Artificial Sequence: Synthetic oligonucleotide
  source 1..21: mol_type = other RNA
  modified_base 1: mod_base = OTHER; note = 2'-O-methyladenosine-3'-phosphorothioate
  modified_base 2: mod_base = OTHER; note = 2'-O-methyladenosine-3'-phosphorothioate
  modified_base 3: mod_base = OTHER; note = 2'-O-methylguanosine-3'-phosphate
  modified_base 4: mod_base = OTHER; note = 2'-O-methylcytidine-3'-phosphate
  modified_base 5: mod_base = OTHER; note = 2'-O-methylguanosine-3'-phosphate
  modified_base 6: mod_base = OTHER; note = 2'-O-methylguanosine-3'-phosphate
  modified_base 7: mod_base = OTHER; note = 2'-fluoroguanosine-3'-phosphate
  modified_base 8: mod_base = OTHER; note = 2'-O-methyladenosine-3'-phosphate
  modified_base 9: mod_base = OTHER; note = 2'-fluorocytidine-3'-phosphate
  modified_base 10: mod_base = OTHER; note = 2'-fluorocytidine-3'-phosphate
  modified_base 11: mod_base = OTHER; note = 2'-fluorouridine-3'-phosphate
  modified_base 12: mod_base = OTHER; note = 2'-O-methylguanosine-3'-phosphate
  modified_base 13: mod_base = OTHER; note = 2'-O-methylguanosine-3'-phosphate
  modified_base 14: mod_base = OTHER; note = 2'-O-methyladenosine-3'-phosphate
  modified_base 15: mod_base = OTHER; note = 2'-O-methylguanosine-3'-phosphate
  modified_base 16: mod_base = OTHER; note = 2'-O-methyladenosine-3'-phosphate
  modified_base 17: mod_base = OTHER; note = 2'-O-methyluridine-3'-phosphate
  modified_base 18: mod_base = OTHER; note = 2'-O-methyladenosine-3'-phosphate
  modified_base 19: mod_base = OTHER; note = 2'-O-methylguanosine-3'-phosphate
  modified_base 20: mod_base = OTHER; note = 2'-O-methyladenosine-3'-phosphate
  modified_base 21: mod_base = OTHER; note = 2'-O-methyluridine-3'-phosphate N-[tris(GalNAc-alkyl)-amidodecanoyl)]-4-hydroxyprolinol (Hyp-(GalNAc-alkyl)3)
aagcgggacctggagatagat

SEQ ID NO: 1305 - RNA, 21 nt, synthetic construct
  misc_feature 1..21: note = Description of Artificial Sequence: Synthetic oligonucleotide
  source 1..21: mol_type = other RNA
  modified_base 1: mod_base = OTHER; note = 2'-O-methyladenosine-3'-phosphorothioate
  modified_base 2: mod_base = OTHER; note = 2'-O-methyladenosine-3'-phosphorothioate
  modified_base 3: mod_base = OTHER; note = 2'-O-methyladenosine-3'-phosphate
  modified_base 4: mod_base = OTHER; note = 2'-O-methylguanosine-3'-phosphate
  modified_base 5: mod_base = OTHER; note = 2'-O-methylcytidine-3'-phosphate
  modified_base 6: mod_base = OTHER; note = 2'-O-methyluridine-3'-phosphate
  modified_base 7: mod_base = OTHER; note = 2'-fluorocytidine-3'-phosphate
  modified_base 8: mod_base = OTHER; note = 2'-O-methyluridine-3'-phosphate
  modified_base 9: mod_base = OTHER; note = 2'-fluoroguanosine-3'-phosphate
  modified_base 10: mod_base = OTHER; note = 2'-fluorouridine-3'-phosphate
  modified_base 11: mod_base = OTHER; note = 2'-fluorouridine-3'-phosphate
  modified_base 12: mod_base = OTHER; note = 2'-O-methyluridine-3'-phosphate
  modified_base 13: mod_base = OTHER; note = 2'-O-methylguanosine-3'-phosphate
  modified_base 14: mod_base = OTHER; note = 2'-O-methyluridine-3'-phosphate
  modified_base 15: mod_base = OTHER; note = 2'-O-methylguanosine-3'-phosphate
  modified_base 16: mod_base = OTHER; note = 2'-O-methyluridine-3'-phosphate
  modified_base 17: mod_base = OTHER; note = 2'-O-methylcytidine-3'-phosphate
  modified_base 18: mod_base = OTHER; note = 2'-O-methyluridine-3'-phosphate
  modified_base 19: mod_base = OTHER; note = 2'-O-methylguanosine-3'-phosphate
  modified_base 20: mod_base = OTHER; note = 2'-O-methyladenosine-3'-phosphate
  modified_base 21: mod_base = OTHER; note = 2'-O-methyluridine-3'-phosphate N-[tris(GalNAc-alkyl)-amidodecanoyl)]-4-hydroxyprolinol (Hyp-(GalNAc-alkyl)3)
aaagctctgtttgtgtctgat

SEQ ID NO: 1306 - RNA, 21 nt, synthetic construct
  misc_feature 1..21: note = Description of Artificial Sequence: Synthetic oligonucleotide
  source 1..21: mol_type = other RNA
  modified_base 1: mod_base = OTHER; note = 2'-O-methyluridine-3'-phosphorothioate
  modified_base 2: mod_base = OTHER; note = 2'-O-methylguanosine-3'-phosphorothioate
  modified_base 3: mod_base = OTHER; note = 2'-O-methylguanosine-3'-phosphate
  modified_base 4: mod_base = OTHER; note = 2'-O-methylcytidine-3'-phosphate
  modified_base 5: mod_base = OTHER; note = 2'-O-methyluridine-3'-phosphate
  modified_base 6: mod_base = OTHER; note = 2'-O-methylguanosine-3'-phosphate
  modified_base 7: mod_base = OTHER; note = 2'-fluoroadenosine-3'-phosphate
  modified_base 8: mod_base = OTHER; note = 2'-O-methyladenosine-3'-phosphate
  modified_base 9: mod_base = OTHER; note = 2'-fluoroguanosine-3'-phosphate
  modified_base 10: mod_base = OTHER; note = 2'-fluoroguanosine-3'-phosphate
  modified_base 11: mod_base = OTHER; note = 2'-fluoroadenosine-3'-phosphate
  modified_base 12: mod_base = OTHER; note = 2'-O-methylguanosine-3'-phosphate
  modified_base 13: mod_base = OTHER; note = 2'-O-methyladenosine-3'-phosphate
  modified_base 14: mod_base = OTHER; note = 2'-O-methyladenosine-3'-phosphate
  modified_base 15: mod_base = OTHER; note = 2'-O-methyladenosine-3'-phosphate
  modified_base 16: mod_base = OTHER; note = 2'-O-methylcytidine-3'-phosphate
  modified_base 17: mod_base = OTHER; note = 2'-O-methyluridine-3'-phosphate
  modified_base 18: mod_base = OTHER; note = 2'-O-methylcytidine-3'-phosphate
  modified_base 19: mod_base = OTHER; note = 2'-O-methylcytidine-3'-phosphate
  modified_base 20: mod_base = OTHER; note = 2'-O-methyladenosine-3'-phosphate
  modified_base 21: mod_base = OTHER; note = 2'-O-methyluridine-3'-phosphate N-[tris(GalNAc-alkyl)-amidodecanoyl)]-4-hydroxyprolinol (Hyp-(GalNAc-alkyl)3)
tggctgaaggagaaactccat

SEQ ID NO: 1307 - RNA, 23 nt, synthetic construct
  misc_feature 1..23: note = Description of Artificial Sequence: Synthetic oligonucleotide
  source 1..23: mol_type = other RNA
  modified_base 1: mod_base = OTHER; note = 2'-O-methyladenosine-3'-phosphorothioate
  modified_base 2: mod_base = OTHER; note = 2'-fluoroadenosine-3'-phosphorothioate
  modified_base 3: mod_base = OTHER; note = 2'-O-methylguanosine-3'-phosphate
  modified_base 4: mod_base = OTHER; note = 2'-O-methyladenosine-3'-phosphate
  modified_base 5: mod_base = OTHER; note = 2'-O-methylcytidine-3'-phosphate
  modified_base 6: mod_base = OTHER; note = 2'-fluorocytidine-3'-phosphate
  modified_base 7: mod_base = OTHER; note = 2'-O-methyluridine-3'-phosphate
  modified_base 8: mod_base = OTHER; note = 2'-fluoroguanosine-3'-phosphate
  modified_base 9: mod_base = OTHER; note = 2'-fluoroguanosine-3'-phosphate
  modified_base 10: mod_base = OTHER; note = 2'-O-methyluridine-3'-phosphate
  modified_base 11: mod_base = OTHER; note = 2'-O-methylcytidine-3'-phosphate
  modified_base 12: mod_base = OTHER; note = 2'-O-methyladenosine-3'-phosphate
  modified_base 13: mod_base = OTHER; note = 2'-O-methylcytidine-3'-phosphate
  modified_base 14: mod_base = OTHER; note = 2'-fluoroadenosine-3'-phosphate
  modified_base 15: mod_base = OTHER; note = 2'-O-methyluridine-3'-phosphate
  modified_base 16: mod_base = OTHER; note = 2'-fluorouridine-3'-phosphate
  modified_base 17: mod_base = OTHER; note = 2'-O-methylcytidine-3'-phosphate
  modified_base 18: mod_base = OTHER; note = 2'-O-methylcytidine-3'-phosphate
  modified_base 19: mod_base = OTHER; note = 2'-O-methylcytidine-3'-phosphate
  modified_base 20: mod_base = OTHER; note = 2'-O-methyluridine-3'-phosphate
  modified_base 21: mod_base = OTHER; note = 2'-O-methyluridine-3'-phosphorothioate
  modified_base 22: mod_base = OTHER; note = 2'-O-methylcytidine-3'-phosphorothioate
  modified_base 23: mod_base = OTHER; note = 2'-O-methylcytidine-3'-phosphate
aagacctggtcacattcccttcc

SEQ ID NO: 1308 - RNA, 23 nt, synthetic construct
  misc_feature 1..23: note = Description of Artificial Sequence: Synthetic oligonucleotide
  source 1..23: mol_type = other RNA
  modified_base 1: mod_base = OTHER; note = 2'-O-methyladenosine-3'-phosphorothioate
  modified_base 2: mod_base = OTHER; note = 2'-fluorouridine -3'-phosphorothioate
  modified_base 3: mod_base = OTHER; note = 2'-O-methylguanosine-3'-phosphate
  modified_base 4: mod_base = OTHER; note = 2'-O-methyluridine-3'-phosphate
  modified_base 5: mod_base = OTHER; note = 2'-O-methylcytidine-3'-phosphate
  modified_base 6: mod_base = OTHER; note = 2'-fluorocytidine-3'-phosphate
  modified_base 7: mod_base = OTHER; note = 2'-O-methyladenosine-3'-phosphate
  modified_base 8: mod_base = OTHER; note = 2'-fluoroadenosine-3'-phosphate
  modified_base 9: mod_base = OTHER; note = 2'-fluoroguanosine-3'-phosphate
  modified_base 10: mod_base = OTHER; note = 2'-O-methylcytidine-3'-phosphate
  modified_base 11: mod_base = OTHER; note = 2'-O-methyluridine-3'-phosphate
  modified_base 12: mod_base = OTHER; note = 2'-O-methylguanosine-3'-phosphate
  modified_base 13: mod_base = OTHER; note = 2'-O-methyladenosine-3'-phosphate
  modified_base 14: mod_base = OTHER; note = 2'-fluoroadenosine-3'-phosphate
  modified_base 15: mod_base = OTHER; note = 2'-O-methyladenosine-3'-phosphate
  modified_base 16: mod_base = OTHER; note = 2'-fluorocytidine-3'-phosphate
  modified_base 17: mod_base = OTHER; note = 2'-O-methyluridine-3'-phosphate
  modified_base 18: mod_base = OTHER; note = 2'-O-methylcytidine-3'-phosphate
  modified_base 19: mod_base = OTHER; note = 2'-O-methylcytidine-3'-phosphate
  modified_base 20: mod_base = OTHER; note = 2'-O-methyladenosine-3'-phosphate
  modified_base 21: mod_base = OTHER; note = 2'-O-methylguanosine-3'-phosphorothioate
  modified_base 22: mod_base = OTHER; note = 2'-O-methyladenosine-3'-phosphorothioate
  modified_base 23: mod_base = OTHER; note = 2'-O-methylcytidine-3'-phosphate
atgtccaagctgaaactccagac

SEQ ID NO: 1309 - RNA, 23 nt, synthetic construct
  misc_feature 1..23: note = Description of Artificial Sequence: Synthetic oligonucleotide
  source 1..23: mol_type = other RNA
  modified_base 1: mod_base = OTHER; note = 2'-O-methyladenosine-3'-phosphorothioate
  modified_base 2: mod_base = OTHER; note = 2'-fluorouridine -3'-phosphorothioate
  modified_base 3: mod_base = OTHER; note = 2'-O-methylguanosine-3'-phosphate
  modified_base 4: mod_base = OTHER; note = 2'-O-methylcytidine-3'-phosphate
  modified_base 5: mod_base = OTHER; note = 2'-O-methyluridine-3'-phosphate
  modified_base 6: mod_base = OTHER; note = 2'-fluorouridine-3'-phosphate
  modified_base 7: mod_base = OTHER; note = 2'-O-methyluridine-3'-phosphate
  modified_base 8: mod_base = OTHER; note = 2'-fluoroguanosine-3'-phosphate
  modified_base 9: mod_base = OTHER; note = 2'-fluorocytidine-3'-phosphate
  modified_base 10: mod_base = OTHER; note = 2'-O-methyluridine-3'-phosphate
  modified_base 11: mod_base = OTHER; note = 2'-O-methyluridine-3'-phosphate
  modified_base 12: mod_base = OTHER; note = 2'-O-methylguanosine-3'-phosphate
  modified_base 13: mod_base = OTHER; note = 2'-O-methyluridine-3'-phosphate
  modified_base 14: mod_base = OTHER; note = 2'-fluorocytidine-3'-phosphate
  modified_base 15: mod_base = OTHER; note = 2'-O-methyluridine-3'-phosphate
  modified_base 16: mod_base = OTHER; note = 2'-fluoroguanosine-3'-phosphate
  modified_base 17: mod_base = OTHER; note = 2'-O-methylcytidine-3'-phosphate
  modified_base 18: mod_base = OTHER; note = 2'-O-methyluridine-3'-phosphate
  modified_base 19: mod_base = OTHER; note = 2'-O-methyluridine-3'-phosphate
  modified_base 20: mod_base = OTHER; note = 2'-O-methylguanosine-3'-phosphate
  modified_base 21: mod_base = OTHER; note = 2'-O-methylguanosine-3'-phosphorothioate
  modified_base 22: mod_base = OTHER; note = 2'-O-methylcytidine-3'-phosphorothioate
  modified_base 23: mod_base = OTHER; note = 2'-O-methyluridine-3'-phosphate
atgctttgcttgtctgcttggct

SEQ ID NO: 1310 - RNA, 23 nt, synthetic construct
  misc_feature 1..23: note = Description of Artificial Sequence: Synthetic oligonucleotide
  source 1..23: mol_type = other RNA
  modified_base 1: mod_base = OTHER; note = 2'-O-methyladenosine-3'-phosphorothioate
  modified_base 2: mod_base = OTHER; note = 2'-fluoroguanosine-3'-phosphorothioate
  modified_base 3: mod_base = OTHER; note = 2'-O-methylcytidine-3'-phosphate
  modified_base 4: mod_base = OTHER; note = 2'-O-methyladenosine-3'-phosphate
  modified_base 5: mod_base = OTHER; note = 2'-O-methylguanosine-3'-phosphate
  modified_base 6: mod_base = OTHER; note = 2'-fluoroguanosine-3'-phosphate
  modified_base 7: mod_base = OTHER; note = 2'-O-methyladenosine-3'-phosphate
  modified_base 8: mod_base = OTHER; note = 2'-fluorouridine-3'-phosphate
  modified_base 9: mod_base = OTHER; note = 2'-fluoroguanosine-3'-phosphate
  modified_base 10: mod_base = OTHER; note = 2'-O-methylguanosine-3'-phosphate
  modified_base 11: mod_base = OTHER; note = 2'-O-methyluridine-3'-phosphate
  modified_base 12: mod_base = OTHER; note = 2'-O-methylguanosine-3'-phosphate
  modified_base 13: mod_base = OTHER; note = 2'-O-methyluridine-3'-phosphate
  modified_base 14: mod_base = OTHER; note = 2'-fluoroguanosine-3'-phosphate
  modified_base 15: mod_base = OTHER; note = 2'-O-methyluridine-3'-phosphate
  modified_base 16: mod_base = OTHER; note = 2'-fluorocytidine-3'-phosphate
  modified_base 17: mod_base = OTHER; note = 2'-O-methylcytidine-3'-phosphate
  modified_base 18: mod_base = OTHER; note = 2'-O-methyluridine-3'-phosphate
  modified_base 19: mod_base = OTHER; note = 2'-O-methylguanosine-3'-phosphate
  modified_base 20: mod_base = OTHER; note = 2'-O-methylguanosine-3'-phosphate
  modified_base 21: mod_base = OTHER; note = 2'-O-methylcytidine-3'-phosphorothioate
  modified_base 22: mod_base = OTHER; note = 2'-O-methyluridine-3'-phosphorothioate
  modified_base 23: mod_base = OTHER; note = 2'-O-methyluridine-3'-phosphate
agcaggatggtgtgtcctggctt

SEQ ID NO: 1311 - RNA, 23 nt, synthetic construct
  misc_feature 1..23: note = Description of Artificial Sequence: Synthetic oligonucleotide
  source 1..23: mol_type = other RNA
  modified_base 1: mod_base = OTHER; note = 2'-O-methyladenosine-3'-phosphorothioate
  modified_base 2: mod_base = OTHER; note = 2'-fluoroguanosine-3'-phosphorothioate
  modified_base 3: mod_base = OTHER; note = 2'-O-methyladenosine-3'-phosphate
  modified_base 4: mod_base = OTHER; note = 2'-O-methyladenosine-3'-phosphate
  modified_base 5: mod_base = OTHER; note = 2'-O-methylguanosine-3'-phosphate
  modified_base 6: mod_base = OTHER; note = 2'-fluoroguanosine-3'-phosphate
  modified_base 7: mod_base = OTHER; note = 2'-O-methylcytidine-3'-phosphate
  modified_base 8: mod_base = OTHER; note = 2'-fluoroadenosine-3'-phosphate
  modified_base 9: mod_base = OTHER; note = 2'-fluoroguanosine-3'-phosphate
  modified_base 10: mod_base = OTHER; note = 2'-O-methylguanosine-3'-phosphate
  modified_base 11: mod_base = OTHER; note = 2'-O-methyladenosine-3'-phosphate
  modified_base 12: mod_base = OTHER; note = 2'-O-methylguanosine-3'-phosphate
  modified_base 13: mod_base = OTHER; note = 2'-O-methyladenosine-3'-phosphate
  modified_base 14: mod_base = OTHER; note = 2'-fluoroguanosine-3'-phosphate
  modified_base 15: mod_base = OTHER; note = 2'-O-methyladenosine-3'-phosphate
  modified_base 16: mod_base = OTHER; note = 2'-fluoroadenosine-3'-phosphate
  modified_base 17: mod_base = OTHER; note = 2'-O-methylguanosine-3'-phosphate
  modified_base 18: mod_base = OTHER; note = 2'-O-methylcytidine-3'-phosphate
  modified_base 19: mod_base = OTHER; note = 2'-O-methyluridine-3'-phosphate
  modified_base 20: mod_base = OTHER; note = 2'-O-methylguanosine-3'-phosphate
  modified_base 21: mod_base = OTHER; note = 2'-O-methylguanosine-3'-phosphorothioate
  modified_base 22: mod_base = OTHER; note = 2'-O-methylguanosine-3'-phosphorothioate
  modified_base 23: mod_base = OTHER; note = 2'-O-methylcytidine-3'-phosphate
agaaggcaggagagaagctgggc

SEQ ID NO: 1312 - RNA, 23 nt, synthetic construct
  misc_feature 1..23: note = Description of Artificial Sequence: Synthetic oligonucleotide
  source 1..23: mol_type = other RNA
  modified_base 1: mod_base = OTHER; note = 2'-O-methyladenosine-3'-phosphorothioate
  modified_base 2: mod_base = OTHER; note = 2'-fluoroadenosine-3'-phosphorothioate
  modified_base 3: mod_base = OTHER; note = 2'-O-methyladenosine-3'-phosphate
  modified_base 4: mod_base = OTHER; note = 2'-O-methylguanosine-3'-phosphate
  modified_base 5: mod_base = OTHER; note = 2'-O-methyladenosine-3'-phosphate
  modified_base 6: mod_base = OTHER; note = 2'-fluorouridine-3'-phosphate
  modified_base 7: mod_base = OTHER; note = 2'-O-methyladenosine-3'-phosphate
  modified_base 8: mod_base = OTHER; note = 2'-fluoroadenosine-3'-phosphate
  modified_base 9: mod_base = OTHER; note = 2'-fluoroadenosine-3'-phosphate
  modified_base 10: mod_base = OTHER; note = 2'-O-methylguanosine-3'-phosphate
  modified_base 11: mod_base = OTHER; note = 2'-O-methylguanosine-3'-phosphate
  modified_base 12: mod_base = OTHER; note = 2'-O-methylguanosine-3'-phosphate
  modified_base 13: mod_base = OTHER; note = 2'-O-methylcytidine-3'-phosphate
  modified_base 14: mod_base = OTHER; note = 2'-fluoroadenosine-3'-phosphate
  modified_base 15: mod_base = OTHER; note = 2'-O-methyluridine-3'-phosphate
  modified_base 16: mod_base = OTHER; note = 2'-fluorocytidine-3'-phosphate
  modified_base 17: mod_base = OTHER; note = 2'-O-methyladenosine-3'-phosphate
  modified_base 18: mod_base = OTHER; note = 2'-O-methylguanosine-3'-phosphate
  modified_base 19: mod_base = OTHER; note = 2'-O-methylguanosine-3'-phosphate
  modified_base 20: mod_base = OTHER; note = 2'-O-methylcytidine-3'-phosphate
  modified_base 21: mod_base = OTHER; note = 2'-O-methyladenosine-3'-phosphorothioate
  modified_base 22: mod_base = OTHER; note = 2'-O-methylguanosine-3'-phosphorothioate
  modified_base 23: mod_base = OTHER; note = 2'-O-methyladenosine-3'-phosphate
aaagataaagggcatcaggcaga

SEQ ID NO: 1313 - RNA, 23 nt, synthetic construct
  misc_feature 1..23: note = Description of Artificial Sequence: Synthetic oligonucleotide
  source 1..23: mol_type = other RNA
  modified_base 1: mod_base = OTHER; note = 2'-O-methyladenosine-3'-phosphorothioate
  modified_base 2: mod_base = OTHER; note = 2'-fluoroadenosine-3'-phosphorothioate
  modified_base 3: mod_base = OTHER; note = 2'-O-methylcytidine-3'-phosphate
  modified_base 4: mod_base = OTHER; note = 2'-O-methylcytidine-3'-phosphate
  modified_base 5: mod_base = OTHER; note = 2'-O-methyluridine-3'-phosphate
  modified_base 6: mod_base = OTHER; note = 2'-fluorocytidine-3'-phosphate
  modified_base 7: mod_base = OTHER; note = 2'-O-methylcytidine-3'-phosphate
  modified_base 8: mod_base = OTHER; note = 2'-fluoroadenosine-3'-phosphate
  modified_base 9: mod_base = OTHER; note = 2'-fluoroguanosine-3'-phosphate
  modified_base 10: mod_base = OTHER; note = 2'-O-methyladenosine-3'-phosphate
  modified_base 11: mod_base = OTHER; note = 2'-O-methylcytidine-3'-phosphate
  modified_base 12: mod_base = OTHER; note = 2'-O-methyladenosine-3'-phosphate
  modified_base 13: mod_base = OTHER; note = 2'-O-methyladenosine-3'-phosphate
  modified_base 14: mod_base = OTHER; note = 2'-fluoroguanosine-3'-phosphate
  modified_base 15: mod_base = OTHER; note = 2'-O-methyladenosine-3'-phosphate
  modified_base 16: mod_base = OTHER; note = 2'-fluoroguanosine-3'-phosphate
  modified_base 17: mod_base = OTHER; note = 2'-O-methylguanosine-3'-phosphate
  modified_base 18: mod_base = OTHER; note = 2'-O-methylcytidine-3'-phosphate
  modified_base 19: mod_base = OTHER; note = 2'-O-methylcytidine-3'-phosphate
  modified_base 20: mod_base = OTHER; note = 2'-O-methylcytidine-3'-phosphate
  modified_base 21: mod_base = OTHER; note = 2'-O-methyladenosine-3'-phosphorothioate
  modified_base 22: mod_base = OTHER; note = 2'-O-methyladenosine-3'-phosphorothioate
  modified_base 23: mod_base = OTHER; note = 2'-O-methylguanosine-3'-phosphate
aacctccagacaagaggcccaag

SEQ ID NO: 1314 - RNA, 23 nt, synthetic construct
  misc_feature 1..23: note = Description of Artificial Sequence: Synthetic oligonucleotide
  source 1..23: mol_type = other RNA
  modified_base 1: mod_base = OTHER; note = 2'-O-methyladenosine-3'-phosphorothioate
  modified_base 2: mod_base = OTHER; note = 2'-fluorocytidine-3'-phosphorothioate
  modified_base 3: mod_base = OTHER; note = 2'-O-methyladenosine-3'-phosphate
  modified_base 4: mod_base = OTHER; note = 2'-O-methyladenosine-3'-phosphate
  modified_base 5: mod_base = OTHER; note = 2'-O-methyladenosine-3'-phosphate
  modified_base 6: mod_base = OTHER; note = 2'-fluoroguanosine-3'-phosphate
  modified_base 7: mod_base = OTHER; note = 2'-O-methyladenosine-3'-phosphate
  modified_base 8: mod_base = OTHER; note = 2'-fluorocytidine-3'-phosphate
  modified_base 9: mod_base = OTHER; note = 2'-fluorocytidine-3'-phosphate
  modified_base 10: mod_base = OTHER; note = 2'-O-methyladenosine-3'-phosphate
  modified_base 11: mod_base = OTHER; note = 2'-O-methyluridine-3'-phosphate
  modified_base 12: mod_base = OTHER; note = 2'-O-methylguanosine-3'-phosphate
  modified_base 13: mod_base = OTHER; note = 2'-O-methylguanosine-3'-phosphate
  modified_base 14: mod_base = OTHER; note = 2'-fluoroadenosine-3'-phosphate
  modified_base 15: mod_base = OTHER; note = 2'-O-methylguanosine-3'-phosphate
  modified_base 16: mod_base = OTHER; note = 2'-fluorouridine-3'-phosphate
  modified_base 17: mod_base = OTHER; note = 2'-O-methylguanosine-3'-phosphate
  modified_base 18: mod_base = OTHER; note = 2'-O-methylguanosine-3'-phosphate
  modified_base 19: mod_base = OTHER; note = 2'-O-methyluridine-3'-phosphate
  modified_base 20: mod_base = OTHER; note = 2'-O-methylguanosine-3'-phosphate
  modified_base 21: mod_base = OTHER; note = 2'-O-methylguanosine-3'-phosphorothioate
  modified_base 22: mod_base = OTHER; note = 2'-O-methyluridine-3'-phosphorothioate
  modified_base 23: mod_base = OTHER; note = 2'-O-methylcytidine-3'-phosphate
acaaagaccatggagtggtggtc

SEQ ID NO: 1315 - RNA, 23 nt, synthetic construct
  misc_feature 1..23: note = Description of Artificial Sequence: Synthetic oligonucleotide
  source 1..23: mol_type = other RNA
  modified_base 1: mod_base = OTHER; note = 2'-O-methyladenosine-3'-phosphorothioate
  modified_base 2: mod_base = OTHER; note = 2'-fluorouridine -3'-phosphorothioate
  modified_base 3: mod_base = OTHER; note = 2'-O-methylcytidine-3'-phosphate
  modified_base 4: mod_base = OTHER; note = 2'-O-methyluridine-3'-phosphate
  modified_base 5: mod_base = OTHER; note = 2'-O-methyluridine-3'-phosphate
  modified_base 6: mod_base = OTHER; note = 2'-fluoroguanosine-3'-phosphate
  modified_base 7: mod_base = OTHER; note = 2'-O-methylguanosine-3'-phosphate
  modified_base 8: mod_base = OTHER; note = 2'-fluoroadenosine-3'-phosphate
  modified_base 9: mod_base = OTHER; note = 2'-fluoroguanosine-3'-phosphate
  modified_base 10: mod_base = OTHER; note = 2'-O-methyladenosine-3'-phosphate
  modified_base 11: mod_base = OTHER; note = 2'-O-methyladenosine-3'-phosphate
  modified_base 12: mod_base = OTHER; note = 2'-O-methylguanosine-3'-phosphate
  modified_base 13: mod_base = OTHER; note = 2'-O-methyluridine-3'-phosphate
  modified_base 14: mod_base = OTHER; note = 2'-fluorocytidine-3'-phosphate
  modified_base 15: mod_base = OTHER; note = 2'-O-methylguanosine-3'-phosphate
  modified_base 16: mod_base = OTHER; note = 2'-fluoroguanosine-3'-phosphate
  modified_base 17: mod_base = OTHER; note = 2'-O-methyladenosine-3'-phosphate
  modified_base 18: mod_base = OTHER; note = 2'-O-methyladenosine-3'-phosphate
  modified_base 19: mod_base = OTHER; note = 2'-O-methylguanosine-3'-phosphate
  modified_base 20: mod_base = OTHER; note = 2'-O-methylguanosine-3'-phosphate
  modified_base 21: mod_base = OTHER; note = 2'-O-methyladenosine-3'-phosphorothioate
  modified_base 22: mod_base = OTHER; note = 2'-O-methylguanosine-3'-phosphorothioate
  modified_base 23: mod_base = OTHER; note = 2'-O-methylcytidine-3'-phosphate
atcttggagaagtcggaaggagc

SEQ ID NO: 1316 - RNA, 23 nt, synthetic construct
  misc_feature 1..23: note = Description of Artificial Sequence: Synthetic oligonucleotide
  source 1..23: mol_type = other RNA
  modified_base 1: mod_base = OTHER; note = 2'-O-methyladenosine-3'-phosphorothioate
  modified_base 2: mod_base = OTHER; note = 2'-fluoroadenosine-3'-phosphorothioate
  modified_base 3: mod_base = OTHER; note = 2'-O-methylcytidine-3'-phosphate
  modified_base 4: mod_base = OTHER; note = 2'-O-methyladenosine-3'-phosphate
  modified_base 5: mod_base = OTHER; note = 2'-O-methylcytidine-3'-phosphate
  modified_base 6: mod_base = OTHER; note = 2'-fluoroadenosine-3'-phosphate
  modified_base 7: mod_base = OTHER; note = 2'-O-methylcytidine-3'-phosphate
  modified_base 8: mod_base = OTHER; note = 2'-fluoroguanosine-3'-phosphate
  modified_base 9: mod_base = OTHER; note = 2'-fluorouridine-3'-phosphate
  modified_base 10: mod_base = OTHER; note = 2'-O-methyladenosine-3'-phosphate
  modified_base 11: mod_base = OTHER; note = 2'-O-methylcytidine-3'-phosphate
  modified_base 12: mod_base = OTHER; note = 2'-O-methyluridine-3'-phosphate
  modified_base 13: mod_base = OTHER; note = 2'-O-methylcytidine-3'-phosphate
  modified_base 14: mod_base = OTHER; note = 2'-fluorocytidine-3'-phosphate
  modified_base 15: mod_base = OTHER; note = 2'-O-methyladenosine-3'-phosphate
  modified_base 16: mod_base = OTHER; note = 2'-fluoroguanosine-3'-phosphate
  modified_base 17: mod_base = OTHER; note = 2'-O-methyluridine-3'-phosphate
  modified_base 18: mod_base = OTHER; note = 2'-O-methylguanosine-3'-phosphate
  modified_base 19: mod_base = OTHER; note = 2'-O-methylcytidine-3'-phosphate
  modified_base 20: mod_base = OTHER; note = 2'-O-methylcytidine-3'-phosphate
  modified_base 21: mod_base = OTHER; note = 2'-O-methyluridine-3'-phosphorothioate
  modified_base 22: mod_base = OTHER; note = 2'-O-methylguanosine-3'-phosphorothioate
  modified_base 23: mod_base = OTHER; note = 2'-O-methylguanosine-3'-phosphate
aacacacgtactccagtgcctgg

SEQ ID NO: 1317 - RNA, 23 nt, synthetic construct
  misc_feature 1..23: note = Description of Artificial Sequence: Synthetic oligonucleotide
  source 1..23: mol_type = other RNA
  modified_base 1: mod_base = OTHER; note = 2'-O-methyladenosine-3'-phosphorothioate
  modified_base 2: mod_base = OTHER; note = 2'-fluoroguanosine-3'-phosphorothioate
  modified_base 3: mod_base = OTHER; note = 2'-O-methyluridine-3'-phosphate
  modified_base 4: mod_base = OTHER; note = 2'-O-methyladenosine-3'-phosphate
  modified_base 5: mod_base = OTHER; note = 2'-O-methylguanosine-3'-phosphate
  modified_base 6: mod_base = OTHER; note = 2'-fluoroadenosine-3'-phosphate
  modified_base 7: mod_base = OTHER; note = 2'-O-methyladenosine-3'-phosphate
  modified_base 8: mod_base = OTHER; note = 2'-fluoroguanosine-3'-phosphate
  modified_base 9: mod_base = OTHER; note = 2'-fluorocytidine-3'-phosphate
  modified_base 10: mod_base = OTHER; note = 2'-O-methylcytidine-3'-phosphate
  modified_base 11: mod_base = OTHER; note = 2'-O-methyladenosine-3'-phosphate
  modified_base 12: mod_base = OTHER; note = 2'-O-methylguanosine-3'-phosphate
  modified_base 13: mod_base = OTHER; note = 2'-O-methyladenosine-3'-phosphate
  modified_base 14: mod_base = OTHER; note = 2'-fluoroadenosine-3'-phosphate
  modified_base 15: mod_base = OTHER; note = 2'-O-methylguanosine-3'-phosphate
  modified_base 16: mod_base = OTHER; note = 2'-fluoroguanosine-3'-phosphate
  modified_base 17: mod_base = OTHER; note = 2'-O-methyladenosine-3'-phosphate
  modified_base 18: mod_base = OTHER; note = 2'-O-methylcytidine-3'-phosphate
  modified_base 19: mod_base = OTHER; note = 2'-O-methyladenosine-3'-phosphate
  modified_base 20: mod_base = OTHER; note = 2'-O-methylcytidine-3'-phosphate
  modified_base 21: mod_base = OTHER; note = 2'-O-methyladenosine-3'-phosphorothioate
  modified_base 22: mod_base = OTHER; note = 2'-O-methylcytidine-3'-phosphorothioate
  modified_base 23: mod_base = OTHER; note = 2'-O-methylguanosine-3'-phosphate
agtagaagccagaaggacacacg

SEQ ID NO: 1318 - RNA, 23 nt, synthetic construct
  misc_feature 1..23: note = Description of Artificial Sequence: Synthetic oligonucleotide
  source 1..23: mol_type = other RNA
  modified_base 1: mod_base = OTHER; note = 2'-O-methyladenosine-3'-phosphorothioate
  modified_base 2: mod_base = OTHER; note = 2'-fluoroguanosine-3'-phosphorothioate
  modified_base 3: mod_base = OTHER; note = 2'-O-methyluridine-3'-phosphate
  modified_base 4: mod_base = OTHER; note = 2'-O-methylcytidine-3'-phosphate
  modified_base 5: mod_base = OTHER; note = 2'-O-methyluridine-3'-phosphate
  modified_base 6: mod_base = OTHER; note = 2'-fluoroguanosine-3'-phosphate
  modified_base 7: mod_base = OTHER; note = 2'-O-methylcytidine-3'-phosphate
  modified_base 8: mod_base = OTHER; note = 2'-fluoroadenosine-3'-phosphate
  modified_base 9: mod_base = OTHER; note = 2'-fluorocytidine-3'-phosphate
  modified_base 10: mod_base = OTHER; note = 2'-O-methyladenosine-3'-phosphate
  modified_base 11: mod_base = OTHER; note = 2'-O-methylguanosine-3'-phosphate
  modified_base 12: mod_base = OTHER; note = 2'-O-methylguanosine-3'-phosphate
  modified_base 13: mod_base = OTHER; note = 2'-O-methylguanosine-3'-phosphate
  modified_base 14: mod_base = OTHER; note = 2'-fluorouridine-3'-phosphate
  modified_base 15: mod_base = OTHER; note = 2'-O-methyladenosine-3'-phosphate
  modified_base 16: mod_base = OTHER; note = 2'-fluorocytidine-3'-phosphate
  modified_base 17: mod_base = OTHER; note = 2'-O-methylguanosine-3'-phosphate
  modified_base 18: mod_base = OTHER; note = 2'-O-methylguanosine-3'-phosphate
  modified_base 19: mod_base = OTHER; note = 2'-O-methylguanosine-3'-phosphate
  modified_base 20: mod_base = OTHER; note = 2'-O-methyluridine-3'-phosphate
  modified_base 21: mod_base = OTHER; note = 2'-O-methyladenosine-3'-phosphorothioate
  modified_base 22: mod_base = OTHER; note = 2'-O-methylguanosine-3'-phosphorothioate
  modified_base 23: mod_base = OTHER; note = 2'-O-methyladenosine-3'-phosphate
agtctgcacagggtacgggtaga

SEQ ID NO: 1319 - RNA, 23 nt, synthetic construct
  misc_feature 1..23: note = Description of Artificial Sequence: Synthetic oligonucleotide
  source 1..23: mol_type = other RNA
  modified_base 1: mod_base = OTHER; note = 2'-O-methyladenosine-3'-phosphorothioate
  modified_base 2: mod_base = OTHER; note = 2'-fluoroadenosine-3'-phosphorothioate
  modified_base 3: mod_base = OTHER; note = 2'-O-methylguanosine-3'-phosphate
  modified_base 4: mod_base = OTHER; note = 2'-O-methyladenosine-3'-phosphate
  modified_base 5: mod_base = OTHER; note = 2'-O-methyluridine-3'-phosphate
  modified_base 6: mod_base = OTHER; note = 2'-fluorocytidine-3'-phosphate
  modified_base 7: mod_base = OTHER; note = 2'-O-methyluridine-3'-phosphate
  modified_base 8: mod_base = OTHER; note = 2'-fluoroguanosine-3'-phosphate
  modified_base 9: mod_base = OTHER; note = 2'-fluorocytidine-3'-phosphate
  modified_base 10: mod_base = OTHER; note = 2'-O-methyladenosine-3'-phosphate
  modified_base 11: mod_base = OTHER; note = 2'-O-methylguanosine-3'-phosphate
  modified_base 12: mod_base = OTHER; note = 2'-O-methylguanosine-3'-phosphate
  modified_base 13: mod_base = OTHER; note = 2'-O-methyluridine-3'-phosphate
  modified_base 14: mod_base = OTHER; note = 2'-fluoroadenosine-3'-phosphate
  modified_base 15: mod_base = OTHER; note = 2'-O-methylcytidine-3'-phosphate
  modified_base 16: mod_base = OTHER; note = 2'-fluoroguanosine-3'-phosphate
  modified_base 17: mod_base = OTHER; note = 2'-O-methyluridine-3'-phosphate
  modified_base 18: mod_base = OTHER; note = 2'-O-methylguanosine-3'-phosphate
  modified_base 19: mod_base = OTHER; note = 2'-O-methyluridine-3'-phosphate
  modified_base 20: mod_base = OTHER; note = 2'-O-methylcytidine-3'-phosphate
  modified_base 21: mod_base = OTHER; note = 2'-O-methyluridine-3'-phosphorothioate
  modified_base 22: mod_base = OTHER; note = 2'-O-methylguanosine-3'-phosphorothioate
  modified_base 23: mod_base = OTHER; note = 2'-O-methylcytidine-3'-phosphate
aagatctgcaggtacgtgtctgc

SEQ ID NO: 1320 - RNA, 23 nt, synthetic construct
  misc_feature 1..23: note = Description of Artificial Sequence: Synthetic oligonucleotide
  source 1..23: mol_type = other RNA
  modified_base 1: mod_base = OTHER; note = 2'-O-methyladenosine-3'-phosphorothioate
  modified_base 2: mod_base = OTHER; note = 2'-fluoroadenosine-3'-phosphorothioate
  modified_base 3: mod_base = OTHER; note = 2'-O-methylguanosine-3'-phosphate
  modified_base 4: mod_base = OTHER; note = 2'-O-methyluridine-3'-phosphate
  modified_base 5: mod_base = OTHER; note = 2'-O-methylcytidine-3'-phosphate
  modified_base 6: mod_base = OTHER; note = 2'-fluorouridine-3'-phosphate
  modified_base 7: mod_base = OTHER; note = 2'-O-methyluridine-3'-phosphate
  modified_base 8: mod_base = OTHER; note = 2'-fluorouridine-3'-phosphate
  modified_base 9: mod_base = OTHER; note = 2'-fluorouridine-3'-phosphate
  modified_base 10: mod_base = OTHER; note = 2'-O-methylguanosine-3'-phosphate
  modified_base 11: mod_base = OTHER; note = 2'-O-methylguanosine-3'-phosphate
  modified_base 12: mod_base = OTHER; note = 2'-O-methyluridine-3'-phosphate
  modified_base 13: mod_base = OTHER; note = 2'-O-methylcytidine-3'-phosphate
  modified_base 14: mod_base = OTHER; note = 2'-fluorouridine-3'-phosphate
  modified_base 15: mod_base = OTHER; note = 2'-O-methyluridine-3'-phosphate
  modified_base 16: mod_base = OTHER; note = 2'-fluoroguanosine-3'-phosphate
  modified_base 17: mod_base = OTHER; note = 2'-O-methyladenosine-3'-phosphate
  modified_base 18: mod_base = OTHER; note = 2'-O-methylguanosine-3'-phosphate
  modified_base 19: mod_base = OTHER; note = 2'-O-methyluridine-3'-phosphate
  modified_base 20: mod_base = OTHER; note = 2'-O-methylcytidine-3'-phosphate
  modified_base 21: mod_base = OTHER; note = 2'-O-methyluridine-3'-phosphorothioate
  modified_base 22: mod_base = OTHER; note = 2'-O-methyluridine-3'-phosphorothioate
  modified_base 23: mod_base = OTHER; note = 2'-O-methylcytidine-3'-phosphate
aagtcttttggtcttgagtcttc

SEQ ID NO: 1321 - RNA, 23 nt, synthetic construct
  misc_feature 1..23: note = Description of Artificial Sequence: Synthetic oligonucleotide
  source 1..23: mol_type = other RNA
  modified_base 1: mod_base = OTHER; note = 2'-O-methyladenosine-3'-phosphorothioate
  modified_base 2: mod_base = OTHER; note = 2'-fluoroadenosine-3'-phosphorothioate
  modified_base 3: mod_base = OTHER; note = 2'-O-methylcytidine-3'-phosphate
  modified_base 4: mod_base = OTHER; note = 2'-O-methyladenosine-3'-phosphate
  modified_base 5: mod_base = OTHER; note = 2'-O-methylguanosine-3'-phosphate
  modified_base 6: mod_base = OTHER; note = 2'-fluorouridine-3'-phosphate
  modified_base 7: mod_base = OTHER; note = 2'-O-methylguanosine-3'-phosphate
  modified_base 8: mod_base = OTHER; note = 2'-fluoroguanosine-3'-phosphate
  modified_base 9: mod_base = OTHER; note = 2'-fluoroadenosine-3'-phosphate
  modified_base 10: mod_base = OTHER; note = 2'-O-methyluridine-3'-phosphate
  modified_base 11: mod_base = OTHER; note = 2'-O-methyluridine-3'-phosphate
  modified_base 12: mod_base = OTHER; note = 2'-O-methylguanosine-3'-phosphate
  modified_base 13: mod_base = OTHER; note = 2'-O-methylcytidine-3'-phosphate
  modified_base 14: mod_base = OTHER; note = 2'-fluorouridine-3'-phosphate
  modified_base 15: mod_base = OTHER; note = 2'-O-methylcytidine-3'-phosphate
  modified_base 16: mod_base = OTHER; note = 2'-fluorouridine-3'-phosphate
  modified_base 17: mod_base = OTHER; note = 2'-O-methylguanosine-3'-phosphate
  modified_base 18: mod_base = OTHER; note = 2'-O-methylcytidine-3'-phosphate
  modified_base 19: mod_base = OTHER; note = 2'-O-methyladenosine-3'-phosphate
  modified_base 20: mod_base = OTHER; note = 2'-O-methylcytidine-3'-phosphate
  modified_base 21: mod_base = OTHER; note = 2'-O-methyluridine-3'-phosphorothioate
  modified_base 22: mod_base = OTHER; note = 2'-O-methylcytidine-3'-phosphorothioate
  modified_base 23: mod_base = OTHER; note = 2'-O-methyluridine-3'-phosphate
aacagtggattgctctgcactct

SEQ ID NO: 1322 - RNA, 23 nt, synthetic construct
  misc_feature 1..23: note = Description of Artificial Sequence: Synthetic oligonucleotide
  source 1..23: mol_type = other RNA
  modified_base 1: mod_base = OTHER; note = 2'-O-methyladenosine-3'-phosphorothioate
  modified_base 2: mod_base = OTHER; note = 2'-fluorocytidine-3'-phosphorothioate
  modified_base 3: mod_base = OTHER; note = 2'-O-methylguanosine-3'-phosphate
  modified_base 4: mod_base = OTHER; note = 2'-O-methyluridine-3'-phosphate
  modified_base 5: mod_base = OTHER; note = 2'-O-methyluridine-3'-phosphate
  modified_base 6: mod_base = OTHER; note = 2'-fluorocytidine-3'-phosphate
  modified_base 7: mod_base = OTHER; note = 2'-O-methyluridine-3'-phosphate
  modified_base 8: mod_base = OTHER; note = 2'-fluorocytidine-3'-phosphate
  modified_base 9: mod_base = OTHER; note = 2'-fluoroguanosine-3'-phosphate
  modified_base 10: mod_base = OTHER; note = 2'-O-methyladenosine-3'-phosphate
  modified_base 11: mod_base = OTHER; note = 2'-O-methyladenosine-3'-phosphate
  modified_base 12: mod_base = OTHER; note = 2'-O-methylguanosine-3'-phosphate
  modified_base 13: mod_base = OTHER; note = 2'-O-methyluridine-3'-phosphate
  modified_base 14: mod_base = OTHER; note = 2'-fluorocytidine-3'-phosphate
  modified_base 15: mod_base = OTHER; note = 2'-O-methylguanosine-3'-phosphate
  modified_base 16: mod_base = OTHER; note = 2'-fluorouridine-3'-phosphate
  modified_base 17: mod_base = OTHER; note = 2'-O-methylguanosine-3'-phosphate
  modified_base 18: mod_base = OTHER; note = 2'-O-methyluridine-3'-phosphate
  modified_base 19: mod_base = OTHER; note = 2'-O-methylguanosine-3'-phosphate
  modified_base 20: mod_base = OTHER; note = 2'-O-methylguanosine-3'-phosphate
  modified_base 21: mod_base = OTHER; note = 2'-O-methyluridine-3'-phosphorothioate
  modified_base 22: mod_base = OTHER; note = 2'-O-methylcytidine-3'-phosphorothioate
  modified_base 23: mod_base = OTHER; note = 2'-O-methyluridine-3'-phosphate
acgttctcgaagtcgtgtggtct

SEQ ID NO: 1323 - RNA, 23 nt, synthetic construct
  misc_feature 1..23: note = Description of Artificial Sequence: Synthetic oligonucleotide
  source 1..23: mol_type = other RNA
  modified_base 1: mod_base = OTHER; note = 2'-O-methyladenosine-3'-phosphorothioate
  modified_base 2: mod_base = OTHER; note = 2'-fluoroadenosine-3'-phosphorothioate
  modified_base 3: mod_base = OTHER; note = 2'-O-methyluridine-3'-phosphate
  modified_base 4: mod_base = OTHER; note = 2'-O-methylcytidine-3'-phosphate
  modified_base 5: mod_base = OTHER; note = 2'-O-methyladenosine-3'-phosphate
  modified_base 6: mod_base = OTHER; note = 2'-fluorocytidine-3'-phosphate
  modified_base 7: mod_base = OTHER; note = 2'-O-methyluridine-3'-phosphate
  modified_base 8: mod_base = OTHER; note = 2'-fluorocytidine-3'-phosphate
  modified_base 9: mod_base = OTHER; note = 2'-fluoroadenosine-3'-phosphate
  modified_base 10: mod_base = OTHER; note = 2'-O-methylcytidine-3'-phosphate
  modified_base 11: mod_base = OTHER; note = 2'-O-methyladenosine-3'-phosphate
  modified_base 12: mod_base = OTHER; note = 2'-O-methyluridine-3'-phosphate
  modified_base 13: mod_base = OTHER; note = 2'-O-methyluridine-3'-phosphate
  modified_base 14: mod_base = OTHER; note = 2'-fluoroguanosine-3'-phosphate
  modified_base 15: mod_base = OTHER; note = 2'-O-methyluridine-3'-phosphate
  modified_base 16: mod_base = OTHER; note = 2'-fluoroadenosine-3'-phosphate
  modified_base 17: mod_base = OTHER; note = 2'-O-methylguanosine-3'-phosphate
  modified_base 18: mod_base = OTHER; note = 2'-O-methyluridine-3'-phosphate
  modified_base 19: mod_base = OTHER; note = 2'-O-methyladenosine-3'-phosphate
  modified_base 20: mod_base = OTHER; note = 2'-O-methylguanosine-3'-phosphate
  modified_base 21: mod_base = OTHER; note = 2'-O-methylguanosine-3'-phosphorothioate
  modified_base 22: mod_base = OTHER; note = 2'-O-methylguanosine-3'-phosphorothioate
  modified_base 23: mod_base = OTHER; note = 2'-O-methyladenosine-3'-phosphate
aatcactcacattgtagtaggga

SEQ ID NO: 1324 - RNA, 23 nt, synthetic construct
  misc_feature 1..23: note = Description of Artificial Sequence: Synthetic oligonucleotide
  source 1..23: mol_type = other RNA
  modified_base 1: mod_base = OTHER; note = 2'-O-methyladenosine-3'-phosphorothioate
  modified_base 2: mod_base = OTHER; note = 2'-fluoroadenosine-3'-phosphorothioate
  modified_base 3: mod_base = OTHER; note = 2'-O-methylguanosine-3'-phosphate
  modified_base 4: mod_base = OTHER; note = 2'-O-methyluridine-3'-phosphate
  modified_base 5: mod_base = OTHER; note = 2'-O-methylguanosine-3'-phosphate
  modified_base 6: mod_base = OTHER; note = 2'-fluoroguanosine-3'-phosphate
  modified_base 7: mod_base = OTHER; note = 2'-O-methyladenosine-3'-phosphate
  modified_base 8: mod_base = OTHER; note = 2'-fluoroadenosine-3'-phosphate
  modified_base 9: mod_base = OTHER; note = 2'-fluoroadenosine-3'-phosphate
  modified_base 10: mod_base = OTHER; note = 2'-O-methylguanosine-3'-phosphate
  modified_base 11: mod_base = OTHER; note = 2'-O-methyladenosine-3'-phosphate
  modified_base 12: mod_base = OTHER; note = 2'-O-methylguanosine-3'-phosphate
  modified_base 13: mod_base = OTHER; note = 2'-O-methyladenosine-3'-phosphate
  modified_base 14: mod_base = OTHER; note = 2'-fluorouridine-3'-phosphate
  modified_base 15: mod_base = OTHER; note = 2'-O-methylcytidine-3'-phosphate
  modified_base 16: mod_base = OTHER; note = 2'-fluorouridine-3'-phosphate
  modified_base 17: mod_base = OTHER; note = 2'-O-methylcytidine-3'-phosphate
  modified_base 18: mod_base = OTHER; note = 2'-O-methyladenosine-3'-phosphate
  modified_base 19: mod_base = OTHER; note = 2'-O-methyluridine-3'-phosphate
  modified_base 20: mod_base = OTHER; note = 2'-O-methylcytidine-3'-phosphate
  modified_base 21: mod_base = OTHER; note = 2'-O-methyladenosine-3'-phosphorothioate
  modified_base 22: mod_base = OTHER; note = 2'-O-methylcytidine-3'-phosphorothioate
  modified_base 23: mod_base = OTHER; note = 2'-O-methyluridine-3'-phosphate
aagtggaaagagatctcatcact

SEQ ID NO: 1325 - RNA, 23 nt, synthetic construct
  misc_feature 1..23: note = Description of Artificial Sequence: Synthetic oligonucleotide
  source 1..23: mol_type = other RNA
  modified_base 1: mod_base = OTHER; note = 2'-O-methyladenosine-3'-phosphorothioate
  modified_base 2: mod_base = OTHER; note = 2'-fluoroadenosine-3'-phosphorothioate
  modified_base 3: mod_base = OTHER; note = 2'-O-methylguanosine-3'-phosphate
  modified_base 4: mod_base = OTHER; note = 2'-O-methyluridine-3'-phosphate
  modified_base 5: mod_base = OTHER; note = 2'-O-methylguanosine-3'-phosphate
  modified_base 6: mod_base = OTHER; note = 2'-fluorouridine-3'-phosphate
  modified_base 7: mod_base = OTHER; note = 2'-O-methyladenosine-3'-phosphate
  modified_base 8: mod_base = OTHER; note = 2'-fluoroadenosine-3'-phosphate
  modified_base 9: mod_base = OTHER; note = 2'-fluorocytidine-3'-phosphate
  modified_base 10: mod_base = OTHER; note = 2'-O-methylcytidine-3'-phosphate
  modified_base 11: mod_base = OTHER; note = 2'-O-methylguanosine-3'-phosphate
  modified_base 12: mod_base = OTHER; note = 2'-O-methyluridine-3'-phosphate
  modified_base 13: mod_base = OTHER; note = 2'-O-methylcytidine-3'-phosphate
  modified_base 14: mod_base = OTHER; note = 2'-fluoroadenosine-3'-phosphate
  modified_base 15: mod_base = OTHER; note = 2'-O-methyluridine-3'-phosphate
  modified_base 16: mod_base = OTHER; note = 2'-fluoroadenosine-3'-phosphate
  modified_base 17: mod_base = OTHER; note = 2'-O-methylguanosine-3'-phosphate
  modified_base 18: mod_base = OTHER; note = 2'-O-methylcytidine-3'-phosphate
  modified_base 19: mod_base = OTHER; note = 2'-O-methyladenosine-3'-phosphate
  modified_base 20: mod_base = OTHER; note = 2'-O-methylguanosine-3'-phosphate
  modified_base 21: mod_base = OTHER; note = 2'-O-methyluridine-3'-phosphorothioate
  modified_base 22: mod_base = OTHER; note = 2'-O-methylguanosine-3'-phosphorothioate
  modified_base 23: mod_base = OTHER; note = 2'-O-methylguanosine-3'-phosphate
aagtgtaaccgtcatagcagtgg

SEQ ID NO: 1326 - RNA, 23 nt, synthetic construct
  misc_feature 1..23: note = Description of Artificial Sequence: Synthetic oligonucleotide
  source 1..23: mol_type = other RNA
  modified_base 1: mod_base = OTHER; note = 2'-O-methyladenosine-3'-phosphorothioate
  modified_base 2: mod_base = OTHER; note = 2'-fluoroguanosine-3'-phosphorothioate
  modified_base 3: mod_base = OTHER; note = 2'-O-methylguanosine-3'-phosphate
  modified_base 4: mod_base = OTHER; note = 2'-O-methylcytidine-3'-phosphate
  modified_base 5: mod_base = OTHER; note = 2'-O-methylcytidine-3'-phosphate
  modified_base 6: mod_base = OTHER; note = 2'-fluoroadenosine-3'-phosphate
  modified_base 7: mod_base = OTHER; note = 2'-O-methyluridine-3'-phosphate
  modified_base 8: mod_base = OTHER; note = 2'-fluorouridine-3'-phosphate
  modified_base 9: mod_base = OTHER; note = 2'-fluorocytidine-3'-phosphate
  modified_base 10: mod_base = OTHER; note = 2'-O-methyladenosine-3'-phosphate
  modified_base 11: mod_base = OTHER; note = 2'-O-methylcytidine-3'-phosphate
  modified_base 12: mod_base = OTHER; note = 2'-O-methyluridine-3'-phosphate
  modified_base 13: mod_base = OTHER; note = 2'-O-methyluridine-3'-phosphate
  modified_base 14: mod_base = OTHER; note = 2'-fluoroguanosine-3'-phosphate
  modified_base 15: mod_base = OTHER; note = 2'-O-methylguanosine-3'-phosphate
  modified_base 16: mod_base = OTHER; note = 2'-fluorocytidine-3'-phosphate
  modified_base 17: mod_base = OTHER; note = 2'-O-methyladenosine-3'-phosphate
  modified_base 18: mod_base = OTHER; note = 2'-O-methylguanosine-3'-phosphate
  modified_base 19: mod_base = OTHER; note = 2'-O-methylguanosine-3'-phosphate
  modified_base 20: mod_base = OTHER; note = 2'-O-methyluridine-3'-phosphate
  modified_base 21: mod_base = OTHER; note = 2'-O-methylguanosine-3'-phosphorothioate
  modified_base 22: mod_base = OTHER; note = 2'-O-methylcytidine-3'-phosphorothioate
  modified_base 23: mod_base = OTHER; note = 2'-O-methylguanosine-3'-phosphate
aggccattcacttggcaggtgcg

SEQ ID NO: 1327 - RNA, 23 nt, synthetic construct
  misc_feature 1..23: note = Description of Artificial Sequence: Synthetic oligonucleotide
  source 1..23: mol_type = other RNA
  modified_base 1: mod_base = OTHER; note = 2'-O-methyladenosine-3'-phosphorothioate
  modified_base 2: mod_base = OTHER; note = 2'-fluorocytidine-3'-phosphorothioate
  modified_base 3: mod_base = OTHER; note = 2'-O-methyluridine-3'-phosphate
  modified_base 4: mod_base = OTHER; note = 2'-O-methylcytidine-3'-phosphate
  modified_base 5: mod_base = OTHER; note = 2'-O-methylcytidine-3'-phosphate
  modified_base 6: mod_base = OTHER; note = 2'-fluoroguanosine-3'-phosphate
  modified_base 7: mod_base = OTHER; note = 2'-O-methyluridine-3'-phosphate
  modified_base 8: mod_base = OTHER; note = 2'-fluorouridine-3'-phosphate
  modified_base 9: mod_base = OTHER; note = 2'-fluoroguanosine-3'-phosphate
  modified_base 10: mod_base = OTHER; note = 2'-O-methyluridine-3'-phosphate
  modified_base 11: mod_base = OTHER; note = 2'-O-methylcytidine-3'-phosphate
  modified_base 12: mod_base = OTHER; note = 2'-O-methyladenosine-3'-phosphate
  modified_base 13: mod_base = OTHER; note = 2'-O-methylcytidine-3'-phosphate
  modified_base 14: mod_base = OTHER; note = 2'-fluoroadenosine-3'-phosphate
  modified_base 15: mod_base = OTHER; note = 2'-O-methylguanosine-3'-phosphate
  modified_base 16: mod_base = OTHER; note = 2'-fluoroadenosine-3'-phosphate
  modified_base 17: mod_base = OTHER; note = 2'-O-methyluridine-3'-phosphate
  modified_base 18: mod_base = OTHER; note = 2'-O-methylcytidine-3'-phosphate
  modified_base 19: mod_base = OTHER; note = 2'-O-methylguanosine-3'-phosphate
  modified_base 20: mod_base = OTHER; note = 2'-O-methylcytidine-3'-phosphate
  modified_base 21: mod_base = OTHER; note = 2'-O-methyluridine-3'-phosphorothioate
  modified_base 22: mod_base = OTHER; note = 2'-O-methylguanosine-3'-phosphorothioate
  modified_base 23: mod_base = OTHER; note = 2'-O-methyluridine-3'-phosphate
actccgttgtcacagatcgctgt

SEQ ID NO: 1328 - RNA, 23 nt, synthetic construct
  misc_feature 1..23: note = Description of Artificial Sequence: Synthetic oligonucleotide
  source 1..23: mol_type = other RNA
  modified_base 1: mod_base = OTHER; note = 2'-O-methyladenosine-3'-phosphorothioate
  modified_base 2: mod_base = OTHER; note = 2'-fluorocytidine-3'-phosphorothioate
  modified_base 3: mod_base = OTHER; note = 2'-O-methylcytidine-3'-phosphate
  modified_base 4: mod_base = OTHER; note = 2'-O-methyladenosine-3'-phosphate
  modified_base 5: mod_base = OTHER; note = 2'-O-methylcytidine-3'-phosphate
  modified_base 6: mod_base = OTHER; note = 2'-fluorocytidine-3'-phosphate
  modified_base 7: mod_base = OTHER; note = 2'-O-methyluridine-3'-phosphate
  modified_base 8: mod_base = OTHER; note = 2'-fluorouridine-3'-phosphate
  modified_base 9: mod_base = OTHER; note = 2'-fluorocytidine-3'-phosphate
  modified_base 10: mod_base = OTHER; note = 2'-O-methylcytidine-3'-phosphate
  modified_base 11: mod_base = OTHER; note = 2'-O-methyluridine-3'-phosphate
  modified_base 12: mod_base = OTHER; note = 2'-O-methyluridine-3'-phosphate
  modified_base 13: mod_base = OTHER; note = 2'-O-methylguanosine-3'-phosphate
  modified_base 14: mod_base = OTHER; note = 2'-fluorouridine-3'-phosphate
  modified_base 15: mod_base = OTHER; note = 2'-O-methylguanosine-3'-phosphate
  modified_base 16: mod_base = OTHER; note = 2'-fluorocytidine-3'-phosphate
  modified_base 17: mod_base = OTHER; note = 2'-O-methylcytidine-3'-phosphate
  modified_base 18: mod_base = OTHER; note = 2'-O-methyladenosine-3'-phosphate
  modified_base 19: mod_base = OTHER; note = 2'-O-methyladenosine-3'-phosphate
  modified_base 20: mod_base = OTHER; note = 2'-O-methyluridine-3'-phosphate
  modified_base 21: mod_base = OTHER; note = 2'-O-methylguanosine-3'-phosphorothioate
  modified_base 22: mod_base = OTHER; note = 2'-O-methylguanosine-3'-phosphorothioate
  modified_base 23: mod_base = OTHER; note = 2'-O-methylguanosine-3'-phosphate
accaccttccttgtgccaatggg

SEQ ID NO: 1329 - RNA, 23 nt, synthetic construct
  misc_feature 1..23: note = Description of Artificial Sequence: Synthetic oligonucleotide
  source 1..23: mol_type = other RNA
  modified_base 1: mod_base = OTHER; note = 2'-O-methyladenosine-3'-phosphorothioate
  modified_base 2: mod_base = OTHER; note = 2'-fluoroguanosine-3'-phosphorothioate
  modified_base 3: mod_base = OTHER; note = 2'-O-methyluridine-3'-phosphate
  modified_base 4: mod_base = OTHER; note = 2'-O-methylguanosine-3'-phosphate
  modified_base 5: mod_base = OTHER; note = 2'-O-methyladenosine-3'-phosphate
  modified_base 6: mod_base = OTHER; note = 2'-fluorocytidine-3'-phosphate
  modified_base 7: mod_base = OTHER; note = 2'-O-methylguanosine-3'-phosphate
  modified_base 8: mod_base = OTHER; note = 2'-fluorocytidine-3'-phosphate
  modified_base 9: mod_base = OTHER; note = 2'-fluorouridine-3'-phosphate
  modified_base 10: mod_base = OTHER; note = 2'-O-methylguanosine-3'-phosphate
  modified_base 11: mod_base = OTHER; note = 2'-O-methyluridine-3'-phosphate
  modified_base 12: mod_base = OTHER; note = 2'-O-methylcytidine-3'-phosphate
  modified_base 13: mod_base = OTHER; note = 2'-O-methyluridine-3'-phosphate
  modified_base 14: mod_base = OTHER; note = 2'-fluorouridine-3'-phosphate
  modified_base 15: mod_base = OTHER; note = 2'-O-methylcytidine-3'-phosphate
  modified_base 16: mod_base = OTHER; note = 2'-fluoroadenosine-3'-phosphate
  modified_base 17: mod_base = OTHER; note = 2'-O-methyladenosine-3'-phosphate
  modified_base 18: mod_base = OTHER; note = 2'-O-methylguanosine-3'-phosphate
  modified_base 19: mod_base = OTHER; note = 2'-O-methylguanosine-3'-phosphate
  modified_base 20: mod_base = OTHER; note = 2'-O-methylcytidine-3'-phosphate
  modified_base 21: mod_base = OTHER; note = 2'-O-methylguanosine-3'-phosphorothioate
  modified_base 22: mod_base = OTHER; note = 2'-O-methylguanosine-3'-phosphorothioate
  modified_base 23: mod_base = OTHER; note = 2'-O-methyluridine-3'-phosphate
agtgacgctgtcttcaaggcggt

SEQ ID NO: 1330 - RNA, 23 nt, synthetic construct
  misc_feature 1..23: note = Description of Artificial Sequence: Synthetic oligonucleotide
  source 1..23: mol_type = other RNA
  modified_base 1: mod_base = OTHER; note = 2'-O-methyladenosine-3'-phosphorothioate
  modified_base 2: mod_base = OTHER; note = 2'-fluoroadenosine-3'-phosphorothioate
  modified_base 3: mod_base = OTHER; note = 2'-O-methylcytidine-3'-phosphate
  modified_base 4: mod_base = OTHER; note = 2'-O-methylcytidine-3'-phosphate
  modified_base 5: mod_base = OTHER; note = 2'-O-methyluridine-3'-phosphate
  modified_base 6: mod_base = OTHER; note = 2'-fluorouridine-3'-phosphate
  modified_base 7: mod_base = OTHER; note = 2'-O-methylcytidine-3'-phosphate
  modified_base 8: mod_base = OTHER; note = 2'-fluorocytidine-3'-phosphate
  modified_base 9: mod_base = OTHER; note = 2'-fluorouridine-3'-phosphate
  modified_base 10: mod_base = OTHER; note = 2'-O-methylguanosine-3'-phosphate
  modified_base 11: mod_base = OTHER; note = 2'-O-methyladenosine-3'-phosphate
  modified_base 12: mod_base = OTHER; note = 2'-O-methylcytidine-3'-phosphate
  modified_base 13: mod_base = OTHER; note = 2'-O-methyladenosine-3'-phosphate
  modified_base 14: mod_base = OTHER; note = 2'-fluorocytidine-3'-phosphate
  modified_base 15: mod_base = OTHER; note = 2'-O-methylguanosine-3'-phosphate
  modified_base 16: mod_base = OTHER; note = 2'-fluorouridine-3'-phosphate
  modified_base 17: mod_base = OTHER; note = 2'-O-methyluridine-3'-phosphate
  modified_base 18: mod_base = OTHER; note = 2'-O-methylcytidine-3'-phosphate
  modified_base 19: mod_base = OTHER; note = 2'-O-methylguanosine-3'-phosphate
  modified_base 20: mod_base = OTHER; note = 2'-O-methylcytidine-3'-phosphate
  modified_base 21: mod_base = OTHER; note = 2'-O-methylcytidine-3'-phosphorothioate
  modified_base 22: mod_base = OTHER; note = 2'-O-methylguanosine-3'-phosphorothioate
  modified_base 23: mod_base = OTHER; note = 2'-O-methylcytidine-3'-phosphate
aaccttcctgacacgttcgccgc

SEQ ID NO: 1331 - RNA, 23 nt, synthetic construct
  misc_feature 1..23: note = Description of Artificial Sequence: Synthetic oligonucleotide
  source 1..23: mol_type = other RNA
  modified_base 1: mod_base = OTHER; note = 2'-O-methyladenosine-3'-phosphorothioate
  modified_base 2: mod_base = OTHER; note = 2'-fluoroadenosine-3'-phosphorothioate
  modified_base 3: mod_base = OTHER; note = 2'-O-methylcytidine-3'-phosphate
  modified_base 4: mod_base = OTHER; note = 2'-O-methyladenosine-3'-phosphate
  modified_base 5: mod_base = OTHER; note = 2'-O-methyluridine-3'-phosphate
  modified_base 6: mod_base = OTHER; note = 2'-fluoroguanosine-3'-phosphate
  modified_base 7: mod_base = OTHER; note = 2'-O-methyladenosine-3'-phosphate
  modified_base 8: mod_base = OTHER; note = 2'-fluoroadenosine-3'-phosphate
  modified_base 9: mod_base = OTHER; note = 2'-fluoroguanosine-3'-phosphate
  modified_base 10: mod_base = OTHER; note = 2'-O-methylguanosine-3'-phosphate
  modified_base 11: mod_base = OTHER; note = 2'-O-methyladenosine-3'-phosphate
  modified_base 12: mod_base = OTHER; note = 2'-O-methylguanosine-3'-phosphate
  modified_base 13: mod_base = OTHER; note = 2'-O-methyluridine-3'-phosphate
  modified_base 14: mod_base = OTHER; note = 2'-fluorocytidine-3'-phosphate
  modified_base 15: mod_base = OTHER; note = 2'-O-methyluridine-3'-phosphate
  modified_base 16: mod_base = OTHER; note = 2'-fluorouridine-3'-phosphate
  modified_base 17: mod_base = OTHER; note = 2'-O-methylguanosine-3'-phosphate
  modified_base 18: mod_base = OTHER; note = 2'-O-methylguanosine-3'-phosphate
  modified_base 19: mod_base = OTHER; note = 2'-O-methylcytidine-3'-phosphate
  modified_base 20: mod_base = OTHER; note = 2'-O-methyladenosine-3'-phosphate
  modified_base 21: mod_base = OTHER; note = 2'-O-methylguanosine-3'-phosphorothioate
  modified_base 22: mod_base = OTHER; note = 2'-O-methylguanosine-3'-phosphorothioate
  modified_base 23: mod_base = OTHER; note = 2'-O-methyladenosine-3'-phosphate
aacatgaaggagtcttggcagga

SEQ ID NO: 1332 - RNA, 23 nt, synthetic construct
  misc_feature 1..23: note = Description of Artificial Sequence: Synthetic oligonucleotide
  source 1..23: mol_type = other RNA
  modified_base 1: mod_base = OTHER; note = 2'-O-methyladenosine-3'-phosphorothioate
  modified_base 2: mod_base = OTHER; note = 2'-fluoroguanosine-3'-phosphorothioate
  modified_base 3: mod_base = OTHER; note = 2'-O-methyladenosine-3'-phosphate
  modified_base 4: mod_base = OTHER; note = 2'-O-methyladenosine-3'-phosphate
  modified_base 5: mod_base = OTHER; note = 2'-O-methylguanosine-3'-phosphate
  modified_base 6: mod_base = OTHER; note = 2'-fluoroadenosine-3'-phosphate
  modified_base 7: mod_base = OTHER; note = 2'-O-methylcytidine-3'-phosphate
  modified_base 8: mod_base = OTHER; note = 2'-fluoroadenosine-3'-phosphate
  modified_base 9: mod_base = OTHER; note = 2'-fluoroguanosine-3'-phosphate
  modified_base 10: mod_base = OTHER; note = 2'-O-methylguanosine-3'-phosphate
  modified_base 11: mod_base = OTHER; note = 2'-O-methyladenosine-3'-phosphate
  modified_base 12: mod_base = OTHER; note = 2'-O-methyladenosine-3'-phosphate
  modified_base 13: mod_base = OTHER; note = 2'-O-methyladenosine-3'-phosphate
  modified_base 14: mod_base = OTHER; note = 2'-fluoroguanosine-3'-phosphate
  modified_base 15: mod_base = OTHER; note = 2'-O-methylcytidine-3'-phosphate
  modified_base 16: mod_base = OTHER; note = 2'-fluorouridine-3'-phosphate
  modified_base 17: mod_base = OTHER; note = 2'-O-methyluridine-3'-phosphate
  modified_base 18: mod_base = OTHER; note = 2'-O-methylcytidine-3'-phosphate
  modified_base 19: mod_base = OTHER; note = 2'-O-methylguanosine-3'-phosphate
  modified_base 20: mod_base = OTHER; note = 2'-O-methylguanosine-3'-phosphate
  modified_base 21: mod_base = OTHER; note = 2'-O-methylcytidine-3'-phosphorothioate
  modified_base 22: mod_base = OTHER; note = 2'-O-methylcytidine-3'-phosphorothioate
  modified_base 23: mod_base = OTHER; note = 2'-O-methyladenosine-3'-phosphate
agaagacaggaaagcttcggcca

SEQ ID NO: 1333 - RNA, 23 nt, synthetic construct
  misc_feature 1..23: note = Description of Artificial Sequence: Synthetic oligonucleotide
  source 1..23: mol_type = other RNA
  modified_base 1: mod_base = OTHER; note = 2'-O-methyladenosine-3'-phosphorothioate
  modified_base 2: mod_base = OTHER; note = 2'-fluorocytidine-3'-phosphorothioate
  modified_base 3: mod_base = OTHER; note = 2'-O-methyluridine-3'-phosphate
  modified_base 4: mod_base = OTHER; note = 2'-O-methyladenosine-3'-phosphate
  modified_base 5: mod_base = OTHER; note = 2'-O-methyluridine-3'-phosphate
  modified_base 6: mod_base = OTHER; note = 2'-fluoroguanosine-3'-phosphate
  modified_base 7: mod_base = OTHER; note = 2'-O-methylguanosine-3'-phosphate
  modified_base 8: mod_base = OTHER; note = 2'-fluorouridine-3'-phosphate
  modified_base 9: mod_base = OTHER; note = 2'-fluorocytidine-3'-phosphate
  modified_base 10: mod_base = OTHER; note = 2'-O-methyluridine-3'-phosphate
  modified_base 11: mod_base = OTHER; note = 2'-O-methylcytidine-3'-phosphate
  modified_base 12: mod_base = OTHER; note = 2'-O-methyluridine-3'-phosphate
  modified_base 13: mod_base = OTHER; note = 2'-O-methylguanosine-3'-phosphate
  modified_base 14: mod_base = OTHER; note = 2'-fluorouridine-3'-phosphate
  modified_base 15: mod_base = OTHER; note = 2'-O-methylcytidine-3'-phosphate
  modified_base 16: mod_base = OTHER; note = 2'-fluoroadenosine-3'-phosphate
  modified_base 17: mod_base = OTHER; note = 2'-O-methylguanosine-3'-phosphate
  modified_base 18: mod_base = OTHER; note = 2'-O-methylguanosine-3'-phosphate
  modified_base 19: mod_base = OTHER; note = 2'-O-methylguanosine-3'-phosphate
  modified_base 20: mod_base = OTHER; note = 2'-O-methyladenosine-3'-phosphate
  modified_base 21: mod_base = OTHER; note = 2'-O-methyladenosine-3'-phosphorothioate
  modified_base 22: mod_base = OTHER; note = 2'-O-methylguanosine-3'-phosphorothioate
  modified_base 23: mod_base = OTHER; note = 2'-O-methyladenosine-3'-phosphate
actatggtctctgtcagggaaga

SEQ ID NO: 1334 - RNA, 23 nt, synthetic construct
  misc_feature 1..23: note = Description of Artificial Sequence: Synthetic oligonucleotide
  source 1..23: mol_type = other RNA
  modified_base 1: mod_base = OTHER; note = 2'-O-methyladenosine-3'-phosphorothioate
  modified_base 2: mod_base = OTHER; note = 2'-fluorocytidine-3'-phosphorothioate
  modified_base 3: mod_base = OTHER; note = 2'-O-methylcytidine-3'-phosphate
  modified_base 4: mod_base = OTHER; note = 2'-O-methyladenosine-3'-phosphate
  modified_base 5: mod_base = OTHER; note = 2'-O-methyluridine-3'-phosphate
  modified_base 6: mod_base = OTHER; note = 2'-fluorocytidine-3'-phosphate
  modified_base 7: mod_base = OTHER; note = 2'-O-methylcytidine-3'-phosphate
  modified_base 8: mod_base = OTHER; note = 2'-fluorouridine-3'-phosphate
  modified_base 9: mod_base = OTHER; note = 2'-fluorocytidine-3'-phosphate
  modified_base 10: mod_base = OTHER; note = 2'-O-methyladenosine-3'-phosphate
  modified_base 11: mod_base = OTHER; note = 2'-O-methylguanosine-3'-phosphate
  modified_base 12: mod_base = OTHER; note = 2'-O-methylcytidine-3'-phosphate
  modified_base 13: mod_base = OTHER; note = 2'-O-methyladenosine-3'-phosphate
  modified_base 14: mod_base = OTHER; note = 2'-fluorouridine-3'-phosphate
  modified_base 15: mod_base = OTHER; note = 2'-O-methylcytidine-3'-phosphate
  modified_base 16: mod_base = OTHER; note = 2'-fluoroguanosine-3'-phosphate
  modified_base 17: mod_base = OTHER; note = 2'-O-methyladenosine-3'-phosphate
  modified_base 18: mod_base = OTHER; note = 2'-O-methylcytidine-3'-phosphate
  modified_base 19: mod_base = OTHER; note = 2'-O-methyluridine-3'-phosphate
  modified_base 20: mod_base = OTHER; note = 2'-O-methylcytidine-3'-phosphate
  modified_base 21: mod_base = OTHER; note = 2'-O-methylcytidine-3'-phosphorothioate
  modified_base 22: mod_base = OTHER; note = 2'-O-methyluridine-3'-phosphorothioate
  modified_base 23: mod_base = OTHER; note = 2'-O-methyluridine-3'-phosphate
accatcctcagcatcgactcctt

SEQ ID NO: 1335 - RNA, 23 nt, synthetic construct
  misc_feature 1..23: note = Description of Artificial Sequence: Synthetic oligonucleotide
  source 1..23: mol_type = other RNA
  modified_base 1: mod_base = OTHER; note = 2'-O-methyladenosine-3'-phosphorothioate
  modified_base 2: mod_base = OTHER; note = 2'-fluoroadenosine-3'-phosphorothioate
  modified_base 3: mod_base = OTHER; note = 2'-O-methylcytidine-3'-phosphate
  modified_base 4: mod_base = OTHER; note = 2'-O-methylguanosine-3'-phosphate
  modified_base 5: mod_base = OTHER; note = 2'-O-methyladenosine-3'-phosphate
  modified_base 6: mod_base = OTHER; note = 2'-fluorouridine-3'-phosphate
  modified_base 7: mod_base = OTHER; note = 2'-O-methylcytidine-3'-phosphate
  modified_base 8: mod_base = OTHER; note = 2'-fluorouridine-3'-phosphate
  modified_base 9: mod_base = OTHER; note = 2'-fluorouridine-3'-phosphate
  modified_base 10: mod_base = OTHER; note = 2'-O-methylcytidine-3'-phosphate
  modified_base 11: mod_base = OTHER; note = 2'-O-methylcytidine-3'-phosphate
  modified_base 12: mod_base = OTHER; note = 2'-O-methylguanosine-3'-phosphate
  modified_base 13: mod_base = OTHER; note = 2'-O-methylcytidine-3'-phosphate
  modified_base 14: mod_base = OTHER; note = 2'-fluorouridine-3'-phosphate
  modified_base 15: mod_base = OTHER; note = 2'-O-methyluridine-3'-phosphate
  modified_base 16: mod_base = OTHER; note = 2'-fluorocytidine-3'-phosphate
  modified_base 17: mod_base = OTHER; note = 2'-O-methyluridine-3'-phosphate
  modified_base 18: mod_base = OTHER; note = 2'-O-methylguanosine-3'-phosphate
  modified_base 19: mod_base = OTHER; note = 2'-O-methyluridine-3'-phosphate
  modified_base 20: mod_base = OTHER; note = 2'-O-methyluridine-3'-phosphate
  modified_base 21: mod_base = OTHER; note = 2'-O-methylguanosine-3'-phosphorothioate
  modified_base 22: mod_base = OTHER; note = 2'-O-methyluridine-3'-phosphorothioate
  modified_base 23: mod_base = OTHER; note = 2'-O-methyluridine-3'-phosphate
aacgatcttccgcttctgttgtt

SEQ ID NO: 1336 - RNA, 23 nt, synthetic construct
  misc_feature 1..23: note = Description of Artificial Sequence: Synthetic oligonucleotide
  source 1..23: mol_type = other RNA
  modified_base 1: mod_base = OTHER; note = 2'-O-methyladenosine-3'-phosphorothioate
  modified_base 2: mod_base = OTHER; note = 2'-fluoroadenosine-3'-phosphorothioate
  modified_base 3: mod_base = OTHER; note = 2'-O-methyladenosine-3'-phosphate
  modified_base 4: mod_base = OTHER; note = 2'-O-methyluridine-3'-phosphate
  modified_base 5: mod_base = OTHER; note = 2'-O-methylguanosine-3'-phosphate
  modified_base 6: mod_base = OTHER; note = 2'-fluorocytidine-3'-phosphate
  modified_base 7: mod_base = OTHER; note = 2'-O-methyluridine-3'-phosphate
  modified_base 8: mod_base = OTHER; note = 2'-fluoroguanosine-3'-phosphate
  modified_base 9: mod_base = OTHER; note = 2'-fluorouridine-3'-phosphate
  modified_base 10: mod_base = OTHER; note = 2'-O-methylcytidine-3'-phosphate
  modified_base 11: mod_base = OTHER; note = 2'-O-methyluridine-3'-phosphate
  modified_base 12: mod_base = OTHER; note = 2'-O-methylguanosine-3'-phosphate
  modified_base 13: mod_base = OTHER; note = 2'-O-methyladenosine-3'-phosphate
  modified_base 14: mod_base = OTHER; note = 2'-fluorouridine-3'-phosphate
  modified_base 15: mod_base = OTHER; note = 2'-O-methylcytidine-3'-phosphate
  modified_base 16: mod_base = OTHER; note = 2'-fluorocytidine-3'-phosphate
  modified_base 17: mod_base = OTHER; note = 2'-O-methyladenosine-3'-phosphate
  modified_base 18: mod_base = OTHER; note = 2'-O-methyluridine-3'-phosphate
  modified_base 19: mod_base = OTHER; note = 2'-O-methylcytidine-3'-phosphate
  modified_base 20: mod_base = OTHER; note = 2'-O-methyluridine-3'-phosphate
  modified_base 21: mod_base = OTHER; note = 2'-O-methyladenosine-3'-phosphorothioate
  modified_base 22: mod_base = OTHER; note = 2'-O-methylguanosine-3'-phosphorothioate
  modified_base 23: mod_base = OTHER; note = 2'-O-methylcytidine-3'-phosphate
aaatgctgtctgatccatctagc

SEQ ID NO: 1337 - RNA, 23 nt, synthetic construct
  misc_feature 1..23: note = Description of Artificial Sequence: Synthetic oligonucleotide
  source 1..23: mol_type = other RNA
  modified_base 1: mod_base = OTHER; note = 2'-O-methyladenosine-3'-phosphorothioate
  modified_base 2: mod_base = OTHER; note = 2'-fluoroguanosine-3'-phosphorothioate
  modified_base 3: mod_base = OTHER; note = 2'-O-methylcytidine-3'-phosphate
  modified_base 4: mod_base = OTHER; note = 2'-O-methyluridine-3'-phosphate
  modified_base 5: mod_base = OTHER; note = 2'-O-methylcytidine-3'-phosphate
  modified_base 6: mod_base = OTHER; note = 2'-fluorocytidine-3'-phosphate
  modified_base 7: mod_base = OTHER; note = 2'-O-methyluridine-3'-phosphate
  modified_base 8: mod_base = OTHER; note = 2'-fluoroguanosine-3'-phosphate
  modified_base 9: mod_base = OTHER; note = 2'-fluorouridine-3'-phosphate
  modified_base 10: mod_base = OTHER; note = 2'-O-methylguanosine-3'-phosphate
  modified_base 11: mod_base = OTHER; note = 2'-O-methyladenosine-3'-phosphate
  modified_base 12: mod_base = OTHER; note = 2'-O-methyladenosine-3'-phosphate
  modified_base 13: mod_base = OTHER; note = 2'-O-methylguanosine-3'-phosphate
  modified_base 14: mod_base = OTHER; note = 2'-fluorouridine-3'-phosphate
  modified_base 15: mod_base = OTHER; note = 2'-O-methyluridine-3'-phosphate
  modified_base 16: mod_base = OTHER; note = 2'-fluoroguanosine-3'-phosphate
  modified_base 17: mod_base = OTHER; note = 2'-O-methylcytidine-3'-phosphate
  modified_base 18: mod_base = OTHER; note = 2'-O-methyluridine-3'-phosphate
  modified_base 19: mod_base = OTHER; note = 2'-O-methylguanosine-3'-phosphate
  modified_base 20: mod_base = OTHER; note = 2'-O-methylguanosine-3'-phosphate
  modified_base 21: mod_base = OTHER; note = 2'-O-methylcytidine-3'-phosphorothioate
  modified_base 22: mod_base = OTHER; note = 2'-O-methylcytidine-3'-phosphorothioate
  modified_base 23: mod_base = OTHER; note = 2'-O-methylcytidine-3'-phosphate
agctcctgtgaagttgctggccc

SEQ ID NO: 1338 - RNA, 23 nt, synthetic construct
  misc_feature 1..23: note = Description of Artificial Sequence: Synthetic oligonucleotide
  source 1..23: mol_type = other RNA
  modified_base 1: mod_base = OTHER; note = 2'-O-methyladenosine-3'-phosphorothioate
  modified_base 2: mod_base = OTHER; note = 2'-fluorouridine -3'-phosphorothioate
  modified_base 3: mod_base = OTHER; note = 2'-O-methyladenosine-3'-phosphate
  modified_base 4: mod_base = OTHER; note = 2'-O-methyladenosine-3'-phosphate
  modified_base 5: mod_base = OTHER; note = 2'-O-methylcytidine-3'-phosphate
  modified_base 6: mod_base = OTHER; note = 2'-fluorouridine-3'-phosphate
  modified_base 7: mod_base = OTHER; note = 2'-O-methyluridine-3'-phosphate
  modified_base 8: mod_base = OTHER; note = 2'-fluoroguanosine-3'-phosphate
  modified_base 9: mod_base = OTHER; note = 2'-fluorocytidine-3'-phosphate
  modified_base 10: mod_base = OTHER; note = 2'-O-methylcytidine-3'-phosphate
  modified_base 11: mod_base = OTHER; note = 2'-O-methyladenosine-3'-phosphate
  modified_base 12: mod_base = OTHER; note = 2'-O-methylcytidine-3'-phosphate
  modified_base 13: mod_base = OTHER; note = 2'-O-methylcytidine-3'-phosphate
  modified_base 14: mod_base = OTHER; note = 2'-fluorouridine-3'-phosphate
  modified_base 15: mod_base = OTHER; note = 2'-O-methyluridine-3'-phosphate
  modified_base 16: mod_base = OTHER; note = 2'-fluorocytidine-3'-phosphate
  modified_base 17: mod_base = OTHER; note = 2'-O-methyluridine-3'-phosphate
  modified_base 18: mod_base = OTHER; note = 2'-O-methylcytidine-3'-phosphate
  modified_base 19: mod_base = OTHER; note = 2'-O-methyladenosine-3'-phosphate
  modified_base 20: mod_base = OTHER; note = 2'-O-methyladenosine-3'-phosphate
  modified_base 21: mod_base = OTHER; note = 2'-O-methyluridine-3'-phosphorothioate
  modified_base 22: mod_base = OTHER; note = 2'-O-methyluridine-3'-phosphorothioate
  modified_base 23: mod_base = OTHER; note = 2'-O-methyladenosine-3'-phosphate
ataacttgccaccttctcaatta

SEQ ID NO: 1339 - RNA, 23 nt, synthetic construct
  misc_feature 1..23: note = Description of Artificial Sequence: Synthetic oligonucleotide
  source 1..23: mol_type = other RNA
  modified_base 1: mod_base = OTHER; note = 2'-O-methyladenosine-3'-phosphorothioate
  modified_base 2: mod_base = OTHER; note = 2'-fluorouridine -3'-phosphorothioate
  modified_base 3: mod_base = OTHER; note = 2'-O-methylcytidine-3'-phosphate
  modified_base 4: mod_base = OTHER; note = 2'-O-methyladenosine-3'-phosphate
  modified_base 5: mod_base = OTHER; note = 2'-O-methylguanosine-3'-phosphate
  modified_base 6: mod_base = OTHER; note = 2'-fluoroadenosine-3'-phosphate
  modified_base 7: mod_base = OTHER; note = 2'-O-methylcytidine-3'-phosphate
  modified_base 8: mod_base = OTHER; note = 2'-fluoroadenosine-3'-phosphate
  modified_base 9: mod_base = OTHER; note = 2'-fluorocytidine-3'-phosphate
  modified_base 10: mod_base = OTHER; note = 2'-O-methyluridine-3'-phosphate
  modified_base 11: mod_base = OTHER; note = 2'-O-methyluridine-3'-phosphate
  modified_base 12: mod_base = OTHER; note = 2'-O-methyluridine-3'-phosphate
  modified_base 13: mod_base = OTHER; note = 2'-O-methylguanosine-3'-phosphate
  modified_base 14: mod_base = OTHER; note = 2'-fluoroadenosine-3'-phosphate
  modified_base 15: mod_base = OTHER; note = 2'-O-methylcytidine-3'-phosphate
  modified_base 16: mod_base = OTHER; note = 2'-fluorocytidine-3'-phosphate
  modified_base 17: mod_base = OTHER; note = 2'-O-methylcytidine-3'-phosphate
  modified_base 18: mod_base = OTHER; note = 2'-O-methyladenosine-3'-phosphate
  modified_base 19: mod_base = OTHER; note = 2'-O-methyladenosine-3'-phosphate
  modified_base 20: mod_base = OTHER; note = 2'-O-methyladenosine-3'-phosphate
  modified_base 21: mod_base = OTHER; note = 2'-O-methyluridine-3'-phosphorothioate
  modified_base 22: mod_base = OTHER; note = 2'-O-methyluridine-3'-phosphorothioate
  modified_base 23: mod_base = OTHER; note = 2'-O-methyluridine-3'-phosphate
atcagacactttgacccaaattt

SEQ ID NO: 1340 - RNA, 23 nt, synthetic construct
  misc_feature 1..23: note = Description of Artificial Sequence: Synthetic oligonucleotide
  source 1..23: mol_type = other RNA
  modified_base 1: mod_base = OTHER; note = 2'-O-methyladenosine-3'-phosphorothioate
  modified_base 2: mod_base = OTHER; note = 2'-fluoroadenosine-3'-phosphorothioate
  modified_base 3: mod_base = OTHER; note = 2'-O-methylguanosine-3'-phosphate
  modified_base 4: mod_base = OTHER; note = 2'-O-methyluridine-3'-phosphate
  modified_base 5: mod_base = OTHER; note = 2'-O-methylcytidine-3'-phosphate
  modified_base 6: mod_base = OTHER; note = 2'-fluorouridine-3'-phosphate
  modified_base 7: mod_base = OTHER; note = 2'-O-methylguanosine-3'-phosphate
  modified_base 8: mod_base = OTHER; note = 2'-fluorocytidine-3'-phosphate
  modified_base 9: mod_base = OTHER; note = 2'-fluoroadenosine-3'-phosphate
  modified_base 10: mod_base = OTHER; note = 2'-O-methyluridine-3'-phosphate
  modified_base 11: mod_base = OTHER; note = 2'-O-methyluridine-3'-phosphate
  modified_base 12: mod_base = OTHER; note = 2'-O-methyladenosine-3'-phosphate
  modified_base 13: mod_base = OTHER; note = 2'-O-methylcytidine-3'-phosphate
  modified_base 14: mod_base = OTHER; note = 2'-fluorouridine-3'-phosphate
  modified_base 15: mod_base = OTHER; note = 2'-O-methylguanosine-3'-phosphate
  modified_base 16: mod_base = OTHER; note = 2'-fluorocytidine-3'-phosphate
  modified_base 17: mod_base = OTHER; note = 2'-O-methyluridine-3'-phosphate
  modified_base 18: mod_base = OTHER; note = 2'-O-methylguanosine-3'-phosphate
  modified_base 19: mod_base = OTHER; note = 2'-O-methyluridine-3'-phosphate
  modified_base 20: mod_base = OTHER; note = 2'-O-methylcytidine-3'-phosphate
  modified_base 21: mod_base = OTHER; note = 2'-O-methyluridine-3'-phosphorothioate
  modified_base 22: mod_base = OTHER; note = 2'-O-methylguanosine-3'-phosphorothioate
  modified_base 23: mod_base = OTHER; note = 2'-O-methylcytidine-3'-phosphate
aagtctgcattactgctgtctgc

SEQ ID NO: 1341 - RNA, 23 nt, synthetic construct
  misc_feature 1..23: note = Description of Artificial Sequence: Synthetic oligonucleotide
  source 1..23: mol_type = other RNA
  modified_base 1: mod_base = OTHER; note = 2'-O-methyladenosine-3'-phosphorothioate
  modified_base 2: mod_base = OTHER; note = 2'-fluoroguanosine-3'-phosphorothioate
  modified_base 3: mod_base = OTHER; note = 2'-O-methyladenosine-3'-phosphate
  modified_base 4: mod_base = OTHER; note = 2'-O-methylcytidine-3'-phosphate
  modified_base 5: mod_base = OTHER; note = 2'-O-methyluridine-3'-phosphate
  modified_base 6: mod_base = OTHER; note = 2'-fluorouridine-3'-phosphate
  modified_base 7: mod_base = OTHER; note = 2'-O-methylcytidine-3'-phosphate
  modified_base 8: mod_base = OTHER; note = 2'-fluoroadenosine-3'-phosphate
  modified_base 9: mod_base = OTHER; note = 2'-fluoroadenosine-3'-phosphate
  modified_base 10: mod_base = OTHER; note = 2'-O-methylcytidine-3'-phosphate
  modified_base 11: mod_base = OTHER; note = 2'-O-methyluridine-3'-phosphate
  modified_base 12: mod_base = OTHER; note = 2'-O-methyluridine-3'-phosphate
  modified_base 13: mod_base = OTHER; note = 2'-O-methylguanosine-3'-phosphate
  modified_base 14: mod_base = OTHER; note = 2'-fluorouridine-3'-phosphate
  modified_base 15: mod_base = OTHER; note = 2'-O-methylguanosine-3'-phosphate
  modified_base 16: mod_base = OTHER; note = 2'-fluoroguanosine-3'-phosphate
  modified_base 17: mod_base = OTHER; note = 2'-O-methyluridine-3'-phosphate
  modified_base 18: mod_base = OTHER; note = 2'-O-methylcytidine-3'-phosphate
  modified_base 19: mod_base = OTHER; note = 2'-O-methyluridine-3'-phosphate
  modified_base 20: mod_base = OTHER; note = 2'-O-methyluridine-3'-phosphate
  modified_base 21: mod_base = OTHER; note = 2'-O-methylcytidine-3'-phosphorothioate
  modified_base 22: mod_base = OTHER; note = 2'-O-methyladenosine-3'-phosphorothioate
  modified_base 23: mod_base = OTHER; note = 2'-O-methyluridine-3'-phosphate
agacttcaacttgtggtcttcat

SEQ ID NO: 1342 - RNA, 23 nt, synthetic construct
  misc_feature 1..23: note = Description of Artificial Sequence: Synthetic oligonucleotide
  source 1..23: mol_type = other RNA
  modified_base 1: mod_base = OTHER; note = 2'-O-methyladenosine-3'-phosphorothioate
  modified_base 2: mod_base = OTHER; note = 2'-fluoroguanosine-3'-phosphorothioate
  modified_base 3: mod_base = OTHER; note = 2'-O-methylcytidine-3'-phosphate
  modified_base 4: mod_base = OTHER; note = 2'-O-methylcytidine-3'-phosphate
  modified_base 5: mod_base = OTHER; note = 2'-O-methyluridine-3'-phosphate
  modified_base 6: mod_base = OTHER; note = 2'-fluorouridine-3'-phosphate
  modified_base 7: mod_base = OTHER; note = 2'-O-methylcytidine-3'-phosphate
  modified_base 8: mod_base = OTHER; note = 2'-fluorouridine-3'-phosphate
  modified_base 9: mod_base = OTHER; note = 2'-fluorouridine-3'-phosphate
  modified_base 10: mod_base = OTHER; note = 2'-O-methylguanosine-3'-phosphate
  modified_base 11: mod_base = OTHER; note = 2'-O-methylguanosine-3'-phosphate
  modified_base 12: mod_base = OTHER; note = 2'-O-methyluridine-3'-phosphate
  modified_base 13: mod_base = OTHER; note = 2'-O-methylguanosine-3'-phosphate
  modified_base 14: mod_base = OTHER; note = 2'-fluorouridine-3'-phosphate
  modified_base 15: mod_base = OTHER; note = 2'-O-methyluridine-3'-phosphate
  modified_base 16: mod_base = OTHER; note = 2'-fluoroadenosine-3'-phosphate
  modified_base 17: mod_base = OTHER; note = 2'-O-methylguanosine-3'-phosphate
  modified_base 18: mod_base = OTHER; note = 2'-O-methyluridine-3'-phosphate
  modified_base 19: mod_base = OTHER; note = 2'-O-methylcytidine-3'-phosphate
  modified_base 20: mod_base = OTHER; note = 2'-O-methylcytidine-3'-phosphate
  modified_base 21: mod_base = OTHER; note = 2'-O-methylcytidine-3'-phosphorothioate
  modified_base 22: mod_base = OTHER; note = 2'-O-methyluridine-3'-phosphorothioate
  modified_base 23: mod_base = OTHER; note = 2'-O-methylguanosine-3'-phosphate
agccttcttggtgttagtccctg

SEQ ID NO: 1343 - RNA, 23 nt, synthetic construct
  misc_feature 1..23: note = Description of Artificial Sequence: Synthetic oligonucleotide
  source 1..23: mol_type = other RNA
  modified_base 1: mod_base = OTHER; note = 2'-O-methyladenosine-3'-phosphorothioate
  modified_base 2: mod_base = OTHER; note = 2'-fluoroadenosine-3'-phosphorothioate
  modified_base 3: mod_base = OTHER; note = 2'-O-methyluridine-3'-phosphate
  modified_base 4: mod_base = OTHER; note = 2'-O-methylcytidine-3'-phosphate
  modified_base 5: mod_base = OTHER; note = 2'-O-methyladenosine-3'-phosphate
  modified_base 6: mod_base = OTHER; note = 2'-fluorouridine-3'-phosphate
  modified_base 7: mod_base = OTHER; note = 2'-O-methylguanosine-3'-phosphate
  modified_base 8: mod_base = OTHER; note = 2'-fluorocytidine-3'-phosphate
  modified_base 9: mod_base = OTHER; note = 2'-fluorouridine-3'-phosphate
  modified_base 10: mod_base = OTHER; note = 2'-O-methylguanosine-3'-phosphate
  modified_base 11: mod_base = OTHER; note = 2'-O-methyluridine-3'-phosphate
  modified_base 12: mod_base = OTHER; note = 2'-O-methyladenosine-3'-phosphate
  modified_base 13: mod_base = OTHER; note = 2'-O-methylcytidine-3'-phosphate
  modified_base 14: mod_base = OTHER; note = 2'-fluoroadenosine-3'-phosphate
  modified_base 15: mod_base = OTHER; note = 2'-O-methylcytidine-3'-phosphate
  modified_base 16: mod_base = OTHER; note = 2'-fluorouridine-3'-phosphate
  modified_base 17: mod_base = OTHER; note = 2'-O-methylguanosine-3'-phosphate
  modified_base 18: mod_base = OTHER; note = 2'-O-methylcytidine-3'-phosphate
  modified_base 19: mod_base = OTHER; note = 2'-O-methylcytidine-3'-phosphate
  modified_base 20: mod_base = OTHER; note = 2'-O-methyluridine-3'-phosphate
  modified_base 21: mod_base = OTHER; note = 2'-O-methylguanosine-3'-phosphorothioate
  modified_base 22: mod_base = OTHER; note = 2'-O-methylguanosine-3'-phosphorothioate
  modified_base 23: mod_base = OTHER; note = 2'-O-methyladenosine-3'-phosphate
aatcatgctgtacactgcctgga

SEQ ID NO: 1344 - RNA, 23 nt, synthetic construct
  misc_feature 1..23: note = Description of Artificial Sequence: Synthetic oligonucleotide
  source 1..23: mol_type = other RNA
  modified_base 1: mod_base = OTHER; note = 2'-O-methyladenosine-3'-phosphorothioate
  modified_base 2: mod_base = OTHER; note = 2'-fluoroadenosine-3'-phosphorothioate
  modified_base 3: mod_base = OTHER; note = 2'-O-methylguanosine-3'-phosphate
  modified_base 4: mod_base = OTHER; note = 2'-O-methylguanosine-3'-phosphate
  modified_base 5: mod_base = OTHER; note = 2'-O-methyladenosine-3'-phosphate
  modified_base 6: mod_base = OTHER; note = 2'-fluoroguanosine-3'-phosphate
  modified_base 7: mod_base = OTHER; note = 2'-O-methylguanosine-3'-phosphate
  modified_base 8: mod_base = OTHER; note = 2'-fluoroguanosine-3'-phosphate
  modified_base 9: mod_base = OTHER; note = 2'-fluoroadenosine-3'-phosphate
  modified_base 10: mod_base = OTHER; note = 2'-O-methylcytidine-3'-phosphate
  modified_base 11: mod_base = OTHER; note = 2'-O-methylguanosine-3'-phosphate
  modified_base 12: mod_base = OTHER; note = 2'-O-methyluridine-3'-phosphate
  modified_base 13: mod_base = OTHER; note = 2'-O-methylcytidine-3'-phosphate
  modified_base 14: mod_base = OTHER; note = 2'-fluoroadenosine-3'-phosphate
  modified_base 15: mod_base = OTHER; note = 2'-O-methyluridine-3'-phosphate
  modified_base 16: mod_base = OTHER; note = 2'-fluorocytidine-3'-phosphate
  modified_base 17: mod_base = OTHER; note = 2'-O-methyluridine-3'-phosphate
  modified_base 18: mod_base = OTHER; note = 2'-O-methylguanosine-3'-phosphate
  modified_base 19: mod_base = OTHER; note = 2'-O-methylguanosine-3'-phosphate
  modified_base 20: mod_base = OTHER; note = 2'-O-methylcytidine-3'-phosphate
  modified_base 21: mod_base = OTHER; note = 2'-O-methylcytidine-3'-phosphorothioate
  modified_base 22: mod_base = OTHER; note = 2'-O-methyladenosine-3'-phosphorothioate
  modified_base 23: mod_base = OTHER; note = 2'-O-methylguanosine-3'-phosphate
aaggagggacgtcatctggccag

SEQ ID NO: 1345 - RNA, 23 nt, synthetic construct
  misc_feature 1..23: note = Description of Artificial Sequence: Synthetic oligonucleotide
  source 1..23: mol_type = other RNA
  modified_base 1: mod_base = OTHER; note = 2'-O-methyladenosine-3'-phosphorothioate
  modified_base 2: mod_base = OTHER; note = 2'-fluorocytidine-3'-phosphorothioate
  modified_base 3: mod_base = OTHER; note = 2'-O-methyladenosine-3'-phosphate
  modified_base 4: mod_base = OTHER; note = 2'-O-methylguanosine-3'-phosphate
  modified_base 5: mod_base = OTHER; note = 2'-O-methyluridine-3'-phosphate
  modified_base 6: mod_base = OTHER; note = 2'-fluorocytidine-3'-phosphate
  modified_base 7: mod_base = OTHER; note = 2'-O-methyladenosine-3'-phosphate
  modified_base 8: mod_base = OTHER; note = 2'-fluorouridine-3'-phosphate
  modified_base 9: mod_base = OTHER; note = 2'-fluoroguanosine-3'-phosphate
  modified_base 10: mod_base = OTHER; note = 2'-O-methyladenosine-3'-phosphate
  modified_base 11: mod_base = OTHER; note = 2'-O-methylguanosine-3'-phosphate
  modified_base 12: mod_base = OTHER; note = 2'-O-methylguanosine-3'-phosphate
  modified_base 13: mod_base = OTHER; note = 2'-O-methyladenosine-3'-phosphate
  modified_base 14: mod_base = OTHER; note = 2'-fluorouridine-3'-phosphate
  modified_base 15: mod_base = OTHER; note = 2'-O-methylguanosine-3'-phosphate
  modified_base 16: mod_base = OTHER; note = 2'-fluoroadenosine-3'-phosphate
  modified_base 17: mod_base = OTHER; note = 2'-O-methyluridine-3'-phosphate
  modified_base 18: mod_base = OTHER; note = 2'-O-methylguanosine-3'-phosphate
  modified_base 19: mod_base = OTHER; note = 2'-O-methyladenosine-3'-phosphate
  modified_base 20: mod_base = OTHER; note = 2'-O-methylcytidine-3'-phosphate
  modified_base 21: mod_base = OTHER; note = 2'-O-methyladenosine-3'-phosphorothioate
  modified_base 22: mod_base = OTHER; note = 2'-O-methyluridine-3'-phosphorothioate
  modified_base 23: mod_base = OTHER; note = 2'-O-methylguanosine-3'-phosphate
acagtcatgaggatgatgacatg

SEQ ID NO: 1346 - RNA, 23 nt, synthetic construct
  misc_feature 1..23: note = Description of Artificial Sequence: Synthetic oligonucleotide
  source 1..23: mol_type = other RNA
  modified_base 1: mod_base = OTHER; note = 2'-O-methyladenosine-3'-phosphorothioate
  modified_base 2: mod_base = OTHER; note = 2'-fluoroadenosine-3'-phosphorothioate
  modified_base 3: mod_base = OTHER; note = 2'-O-methyluridine-3'-phosphate
  modified_base 4: mod_base = OTHER; note = 2'-O-methylguanosine-3'-phosphate
  modified_base 5: mod_base = OTHER; note = 2'-O-methyluridine-3'-phosphate
  modified_base 6: mod_base = OTHER; note = 2'-fluorouridine-3'-phosphate
  modified_base 7: mod_base = OTHER; note = 2'-O-methylguanosine-3'-phosphate
  modified_base 8: mod_base = OTHER; note = 2'-fluorouridine-3'-phosphate
  modified_base 9: mod_base = OTHER; note = 2'-fluoroguanosine-3'-phosphate
  modified_base 10: mod_base = OTHER; note = 2'-O-methylcytidine-3'-phosphate
  modified_base 11: mod_base = OTHER; note = 2'-O-methyladenosine-3'-phosphate
  modified_base 12: mod_base = OTHER; note = 2'-O-methyladenosine-3'-phosphate
  modified_base 13: mod_base = OTHER; note = 2'-O-methyluridine-3'-phosphate
  modified_base 14: mod_base = OTHER; note = 2'-fluorocytidine-3'-phosphate
  modified_base 15: mod_base = OTHER; note = 2'-O-methylcytidine-3'-phosphate
  modified_base 16: mod_base = OTHER; note = 2'-fluoroadenosine-3'-phosphate
  modified_base 17: mod_base = OTHER; note = 2'-O-methyluridine-3'-phosphate
  modified_base 18: mod_base = OTHER; note = 2'-O-methylcytidine-3'-phosphate
  modified_base 19: mod_base = OTHER; note = 2'-O-methyladenosine-3'-phosphate
  modified_base 20: mod_base = OTHER; note = 2'-O-methylguanosine-3'-phosphate
  modified_base 21: mod_base = OTHER; note = 2'-O-methyluridine-3'-phosphorothioate
  modified_base 22: mod_base = OTHER; note = 2'-O-methylcytidine-3'-phosphorothioate
  modified_base 23: mod_base = OTHER; note = 2'-O-methyladenosine-3'-phosphate
aatgttgtgcaatccatcagtca

SEQ ID NO: 1347 - RNA, 23 nt, synthetic construct
  misc_feature 1..23: note = Description of Artificial Sequence: Synthetic oligonucleotide
  source 1..23: mol_type = other RNA
  modified_base 1: mod_base = OTHER; note = 2'-O-methyladenosine-3'-phosphorothioate
  modified_base 2: mod_base = OTHER; note = 2'-fluoroguanosine-3'-phosphorothioate
  modified_base 3: mod_base = OTHER; note = 2'-O-methyladenosine-3'-phosphate
  modified_base 4: mod_base = OTHER; note = 2'-O-methyluridine-3'-phosphate
  modified_base 5: mod_base = OTHER; note = 2'-O-methylcytidine-3'-phosphate
  modified_base 6: mod_base = OTHER; note = 2'-fluorouridine-3'-phosphate
  modified_base 7: mod_base = OTHER; note = 2'-O-methylcytidine-3'-phosphate
  modified_base 8: mod_base = OTHER; note = 2'-fluoroadenosine-3'-phosphate
  modified_base 9: mod_base = OTHER; note = 2'-fluorouridine-3'-phosphate
  modified_base 10: mod_base = OTHER; note = 2'-O-methylcytidine-3'-phosphate
  modified_base 11: mod_base = OTHER; note = 2'-O-methyladenosine-3'-phosphate
  modified_base 12: mod_base = OTHER; note = 2'-O-methyladenosine-3'-phosphate
  modified_base 13: mod_base = OTHER; note = 2'-O-methyluridine-3'-phosphate
  modified_base 14: mod_base = OTHER; note = 2'-fluoroguanosine-3'-phosphate
  modified_base 15: mod_base = OTHER; note = 2'-O-methyladenosine-3'-phosphate
  modified_base 16: mod_base = OTHER; note = 2'-fluorocytidine-3'-phosphate
  modified_base 17: mod_base = OTHER; note = 2'-O-methyladenosine-3'-phosphate
  modified_base 18: mod_base = OTHER; note = 2'-O-methylguanosine-3'-phosphate
  modified_base 19: mod_base = OTHER; note = 2'-O-methyluridine-3'-phosphate
  modified_base 20: mod_base = OTHER; note = 2'-O-methyladenosine-3'-phosphate
  modified_base 21: mod_base = OTHER; note = 2'-O-methyladenosine-3'-phosphorothioate
  modified_base 22: mod_base = OTHER; note = 2'-O-methyluridine-3'-phosphorothioate
  modified_base 23: mod_base = OTHER; note = 2'-O-methyluridine-3'-phosphate
agatctcatcaatgacagtaatt

SEQ ID NO: 1348 - RNA, 23 nt, synthetic construct
  misc_feature 1..23: note = Description of Artificial Sequence: Synthetic oligonucleotide
  source 1..23: mol_type = other RNA
  modified_base 1: mod_base = OTHER; note = 2'-O-methyladenosine-3'-phosphorothioate
  modified_base 2: mod_base = OTHER; note = 2'-fluorouridine -3'-phosphorothioate
  modified_base 3: mod_base = OTHER; note = 2'-O-methyluridine-3'-phosphate
  modified_base 4: mod_base = OTHER; note = 2'-O-methylguanosine-3'-phosphate
  modified_base 5: mod_base = OTHER; note = 2'-O-methylcytidine-3'-phosphate
  modified_base 6: mod_base = OTHER; note = 2'-fluorocytidine-3'-phosphate
  modified_base 7: mod_base = OTHER; note = 2'-O-methyladenosine-3'-phosphate
  modified_base 8: mod_base = OTHER; note = 2'-fluoroadenosine-3'-phosphate
  modified_base 9: mod_base = OTHER; note = 2'-fluorouridine-3'-phosphate
  modified_base 10: mod_base = OTHER; note = 2'-O-methylguanosine-3'-phosphate
  modified_base 11: mod_base = OTHER; note = 2'-O-methyluridine-3'-phosphate
  modified_base 12: mod_base = OTHER; note = 2'-O-methyladenosine-3'-phosphate
  modified_base 13: mod_base = OTHER; note = 2'-O-methyluridine-3'-phosphate
  modified_base 14: mod_base = OTHER; note = 2'-fluoroadenosine-3'-phosphate
  modified_base 15: mod_base = OTHER; note = 2'-O-methylguanosine-3'-phosphate
  modified_base 16: mod_base = OTHER; note = 2'-fluorocytidine-3'-phosphate
  modified_base 17: mod_base = OTHER; note = 2'-O-methyladenosine-3'-phosphate
  modified_base 18: mod_base = OTHER; note = 2'-O-methyladenosine-3'-phosphate
  modified_base 19: mod_base = OTHER; note = 2'-O-methylguanosine-3'-phosphate
  modified_base 20: mod_base = OTHER; note = 2'-O-methyluridine-3'-phosphate
  modified_base 21: mod_base = OTHER; note = 2'-O-methylcytidine-3'-phosphorothioate
  modified_base 22: mod_base = OTHER; note = 2'-O-methylcytidine-3'-phosphorothioate
  modified_base 23: mod_base = OTHER; note = 2'-O-methylcytidine-3'-phosphate
attgccaatgtatagcaagtccc

SEQ ID NO: 1349 - RNA, 23 nt, synthetic construct
  misc_feature 1..23: note = Description of Artificial Sequence: Synthetic oligonucleotide
  source 1..23: mol_type = other RNA
  modified_base 1: mod_base = OTHER; note = 2'-O-methyladenosine-3'-phosphorothioate
  modified_base 2: mod_base = OTHER; note = 2'-fluoroadenosine-3'-phosphorothioate
  modified_base 3: mod_base = OTHER; note = 2'-O-methylcytidine-3'-phosphate
  modified_base 4: mod_base = OTHER; note = 2'-O-methyluridine-3'-phosphate
  modified_base 5: mod_base = OTHER; note = 2'-O-methyluridine-3'-phosphate
  modified_base 6: mod_base = OTHER; note = 2'-fluoroguanosine-3'-phosphate
  modified_base 7: mod_base = OTHER; note = 2'-O-methylguanosine-3'-phosphate
  modified_base 8: mod_base = OTHER; note = 2'-fluorouridine-3'-phosphate
  modified_base 9: mod_base = OTHER; note = 2'-fluorouridine-3'-phosphate
  modified_base 10: mod_base = OTHER; note = 2'-O-methylcytidine-3'-phosphate
  modified_base 11: mod_base = OTHER; note = 2'-O-methyladenosine-3'-phosphate
  modified_base 12: mod_base = OTHER; note = 2'-O-methylcytidine-3'-phosphate
  modified_base 13: mod_base = OTHER; note = 2'-O-methylcytidine-3'-phosphate
  modified_base 14: mod_base = OTHER; note = 2'-fluoroadenosine-3'-phosphate
  modified_base 15: mod_base = OTHER; note = 2'-O-methyladenosine-3'-phosphate
  modified_base 16: mod_base = OTHER; note = 2'-fluoroadenosine-3'-phosphate
  modified_base 17: mod_base = OTHER; note = 2'-O-methylguanosine-3'-phosphate
  modified_base 18: mod_base = OTHER; note = 2'-O-methylguanosine-3'-phosphate
  modified_base 19: mod_base = OTHER; note = 2'-O-methylcytidine-3'-phosphate
  modified_base 20: mod_base = OTHER; note = 2'-O-methylcytidine-3'-phosphate
  modified_base 21: mod_base = OTHER; note = 2'-O-methylcytidine-3'-phosphorothioate
  modified_base 22: mod_base = OTHER; note = 2'-O-methylguanosine-3'-phosphorothioate
  modified_base 23: mod_base = OTHER; note = 2'-O-methyladenosine-3'-phosphate
aacttggttcaccaaaggcccga

SEQ ID NO: 1350 - RNA, 23 nt, synthetic construct
  misc_feature 1..23: note = Description of Artificial Sequence: Synthetic oligonucleotide
  source 1..23: mol_type = other RNA
  modified_base 1: mod_base = OTHER; note = 2'-O-methyladenosine-3'-phosphorothioate
  modified_base 2: mod_base = OTHER; note = 2'-fluoroguanosine-3'-phosphorothioate
  modified_base 3: mod_base = OTHER; note = 2'-O-methylcytidine-3'-phosphate
  modified_base 4: mod_base = OTHER; note = 2'-O-methyluridine-3'-phosphate
  modified_base 5: mod_base = OTHER; note = 2'-O-methylcytidine-3'-phosphate
  modified_base 6: mod_base = OTHER; note = 2'-fluoroadenosine-3'-phosphate
  modified_base 7: mod_base = OTHER; note = 2'-O-methyluridine-3'-phosphate
  modified_base 8: mod_base = OTHER; note = 2'-fluorouridine-3'-phosphate
  modified_base 9: mod_base = OTHER; note = 2'-fluoroguanosine-3'-phosphate
  modified_base 10: mod_base = OTHER; note = 2'-O-methyluridine-3'-phosphate
  modified_base 11: mod_base = OTHER; note = 2'-O-methylcytidine-3'-phosphate
  modified_base 12: mod_base = OTHER; note = 2'-O-methyluridine-3'-phosphate
  modified_base 13: mod_base = OTHER; note = 2'-O-methyluridine-3'-phosphate
  modified_base 14: mod_base = OTHER; note = 2'-fluorouridine-3'-phosphate
  modified_base 15: mod_base = OTHER; note = 2'-O-methylcytidine-3'-phosphate
  modified_base 16: mod_base = OTHER; note = 2'-fluorouridine-3'-phosphate
  modified_base 17: mod_base = OTHER; note = 2'-O-methyluridine-3'-phosphate
  modified_base 18: mod_base = OTHER; note = 2'-O-methylguanosine-3'-phosphate
  modified_base 19: mod_base = OTHER; note = 2'-O-methylguanosine-3'-phosphate
  modified_base 20: mod_base = OTHER; note = 2'-O-methyladenosine-3'-phosphate
  modified_base 21: mod_base = OTHER; note = 2'-O-methyladenosine-3'-phosphorothioate
  modified_base 22: mod_base = OTHER; note = 2'-O-methylguanosine-3'-phosphorothioate
  modified_base 23: mod_base = OTHER; note = 2'-O-methylcytidine-3'-phosphate
agctcattgtctttcttggaagc

SEQ ID NO: 1351 - RNA, 23 nt, synthetic construct
  misc_feature 1..23: note = Description of Artificial Sequence: Synthetic oligonucleotide
  source 1..23: mol_type = other RNA
  modified_base 1: mod_base = OTHER; note = 2'-O-methyladenosine-3'-phosphorothioate
  modified_base 2: mod_base = OTHER; note = 2'-fluoroguanosine-3'-phosphorothioate
  modified_base 3: mod_base = OTHER; note = 2'-O-methyladenosine-3'-phosphate
  modified_base 4: mod_base = OTHER; note = 2'-O-methylcytidine-3'-phosphate
  modified_base 5: mod_base = OTHER; note = 2'-O-methyluridine-3'-phosphate
  modified_base 6: mod_base = OTHER; note = 2'-fluorouridine-3'-phosphate
  modified_base 7: mod_base = OTHER; note = 2'-O-methyluridine-3'-phosphate
  modified_base 8: mod_base = OTHER; note = 2'-fluoroguanosine-3'-phosphate
  modified_base 9: mod_base = OTHER; note = 2'-fluoroadenosine-3'-phosphate
  modified_base 10: mod_base = OTHER; note = 2'-O-methyladenosine-3'-phosphate
  modified_base 11: mod_base = OTHER; note = 2'-O-methylcytidine-3'-phosphate
  modified_base 12: mod_base = OTHER; note = 2'-O-methyladenosine-3'-phosphate
  modified_base 13: mod_base = OTHER; note = 2'-O-methylcytidine-3'-phosphate
  modified_base 14: mod_base = OTHER; note = 2'-fluoroadenosine-3'-phosphate
  modified_base 15: mod_base = OTHER; note = 2'-O-methyluridine-3'-phosphate
  modified_base 16: mod_base = OTHER; note = 2'-fluoroguanosine-3'-phosphate
  modified_base 17: mod_base = OTHER; note = 2'-O-methyluridine-3'-phosphate
  modified_base 18: mod_base = OTHER; note = 2'-O-methyluridine-3'-phosphate
  modified_base 19: mod_base = OTHER; note = 2'-O-methylguanosine-3'-phosphate
  modified_base 20: mod_base = OTHER; note = 2'-O-methylcytidine-3'-phosphate
  modified_base 21: mod_base = OTHER; note = 2'-O-methyluridine-3'-phosphorothioate
  modified_base 22: mod_base = OTHER; note = 2'-O-methylcytidine-3'-phosphorothioate
  modified_base 23: mod_base = OTHER; note = 2'-O-methyladenosine-3'-phosphate
agactttgaacacatgttgctca

SEQ ID NO: 1352 - RNA, 23 nt, synthetic construct
  misc_feature 1..23: note = Description of Artificial Sequence: Synthetic oligonucleotide
  source 1..23: mol_type = other RNA
  modified_base 1: mod_base = OTHER; note = 2'-O-methyladenosine-3'-phosphorothioate
  modified_base 2: mod_base = OTHER; note = 2'-fluoroadenosine-3'-phosphorothioate
  modified_base 3: mod_base = OTHER; note = 2'-O-methylguanosine-3'-phosphate
  modified_base 4: mod_base = OTHER; note = 2'-O-methylguanosine-3'-phosphate
  modified_base 5: mod_base = OTHER; note = 2'-O-methyluridine-3'-phosphate
  modified_base 6: mod_base = OTHER; note = 2'-fluorouridine-3'-phosphate
  modified_base 7: mod_base = OTHER; note = 2'-O-methyluridine-3'-phosphate
  modified_base 8: mod_base = OTHER; note = 2'-fluorouridine-3'-phosphate
  modified_base 9: mod_base = OTHER; note = 2'-fluorocytidine-3'-phosphate
  modified_base 10: mod_base = OTHER; note = 2'-O-methylcytidine-3'-phosphate
  modified_base 11: mod_base = OTHER; note = 2'-O-methyladenosine-3'-phosphate
  modified_base 12: mod_base = OTHER; note = 2'-O-methyluridine-3'-phosphate
  modified_base 13: mod_base = OTHER; note = 2'-O-methyladenosine-3'-phosphate
  modified_base 14: mod_base = OTHER; note = 2'-fluorouridine-3'-phosphate
  modified_base 15: mod_base = OTHER; note = 2'-O-methylcytidine-3'-phosphate
  modified_base 16: mod_base = OTHER; note = 2'-fluorocytidine-3'-phosphate
  modified_base 17: mod_base = OTHER; note = 2'-O-methyluridine-3'-phosphate
  modified_base 18: mod_base = OTHER; note = 2'-O-methyluridine-3'-phosphate
  modified_base 19: mod_base = OTHER; note = 2'-O-methylguanosine-3'-phosphate
  modified_base 20: mod_base = OTHER; note = 2'-O-methyladenosine-3'-phosphate
  modified_base 21: mod_base = OTHER; note = 2'-O-methylcytidine-3'-phosphorothioate
  modified_base 22: mod_base = OTHER; note = 2'-O-methyluridine-3'-phosphorothioate
  modified_base 23: mod_base = OTHER; note = 2'-O-methyluridine-3'-phosphate
aaggttttccatatccttgactt

SEQ ID NO: 1353 - RNA, 23 nt, synthetic construct
  misc_feature 1..23: note = Description of Artificial Sequence: Synthetic oligonucleotide
  source 1..23: mol_type = other RNA
  modified_base 1: mod_base = OTHER; note = 2'-O-methyladenosine-3'-phosphorothioate
  modified_base 2: mod_base = OTHER; note = 2'-fluoroadenosine-3'-phosphorothioate
  modified_base 3: mod_base = OTHER; note = 2'-O-methyluridine-3'-phosphate
  modified_base 4: mod_base = OTHER; note = 2'-O-methyluridine-3'-phosphate
  modified_base 5: mod_base = OTHER; note = 2'-O-methyluridine-3'-phosphate
  modified_base 6: mod_base = OTHER; note = 2'-fluoroguanosine-3'-phosphate
  modified_base 7: mod_base = OTHER; note = 2'-O-methylguanosine-3'-phosphate
  modified_base 8: mod_base = OTHER; note = 2'-fluorouridine-3'-phosphate
  modified_base 9: mod_base = OTHER; note = 2'-fluoroadenosine-3'-phosphate
  modified_base 10: mod_base = OTHER; note = 2'-O-methylguanosine-3'-phosphate
  modified_base 11: mod_base = OTHER; note = 2'-O-methyladenosine-3'-phosphate
  modified_base 12: mod_base = OTHER; note = 2'-O-methyladenosine-3'-phosphate
  modified_base 13: mod_base = OTHER; note = 2'-O-methyladenosine-3'-phosphate
  modified_base 14: mod_base = OTHER; note = 2'-fluoroadenosine-3'-phosphate
  modified_base 15: mod_base = OTHER; note = 2'-O-methylcytidine-3'-phosphate
  modified_base 16: mod_base = OTHER; note = 2'-fluoroadenosine-3'-phosphate
  modified_base 17: mod_base = OTHER; note = 2'-O-methyluridine-3'-phosphate
  modified_base 18: mod_base = OTHER; note = 2'-O-methylcytidine-3'-phosphate
  modified_base 19: mod_base = OTHER; note = 2'-O-methyluridine-3'-phosphate
  modified_base 20: mod_base = OTHER; note = 2'-O-methyluridine-3'-phosphate
  modified_base 21: mod_base = OTHER; note = 2'-O-methylcytidine-3'-phosphorothioate
  modified_base 22: mod_base = OTHER; note = 2'-O-methylcytidine-3'-phosphorothioate
  modified_base 23: mod_base = OTHER; note = 2'-O-methyladenosine-3'-phosphate
aatttggtagaaaacatcttcca

SEQ ID NO: 1354 - RNA, 23 nt, synthetic construct
  misc_feature 1..23: note = Description of Artificial Sequence: Synthetic oligonucleotide
  source 1..23: mol_type = other RNA
  modified_base 1: mod_base = OTHER; note = 2'-O-methyladenosine-3'-phosphorothioate
  modified_base 2: mod_base = OTHER; note = 2'-fluoroadenosine-3'-phosphorothioate
  modified_base 3: mod_base = OTHER; note = 2'-O-methylguanosine-3'-phosphate
  modified_base 4: mod_base = OTHER; note = 2'-O-methyladenosine-3'-phosphate
  modified_base 5: mod_base = OTHER; note = 2'-O-methylguanosine-3'-phosphate
  modified_base 6: mod_base = OTHER; note = 2'-fluoroadenosine-3'-phosphate
  modified_base 7: mod_base = OTHER; note = 2'-O-methylcytidine-3'-phosphate
  modified_base 8: mod_base = OTHER; note = 2'-fluorouridine-3'-phosphate
  modified_base 9: mod_base = OTHER; note = 2'-fluoroguanosine-3'-phosphate
  modified_base 10: mod_base = OTHER; note = 2'-O-methylguanosine-3'-phosphate
  modified_base 11: mod_base = OTHER; note = 2'-O-methylcytidine-3'-phosphate
  modified_base 12: mod_base = OTHER; note = 2'-O-methyluridine-3'-phosphate
  modified_base 13: mod_base = OTHER; note = 2'-O-methyluridine-3'-phosphate
  modified_base 14: mod_base = OTHER; note = 2'-fluorouridine-3'-phosphate
  modified_base 15: mod_base = OTHER; note = 2'-O-methylcytidine-3'-phosphate
  modified_base 16: mod_base = OTHER; note = 2'-fluoroadenosine-3'-phosphate
  modified_base 17: mod_base = OTHER; note = 2'-O-methyluridine-3'-phosphate
  modified_base 18: mod_base = OTHER; note = 2'-O-methylcytidine-3'-phosphate
  modified_base 19: mod_base = OTHER; note = 2'-O-methylguanosine-3'-phosphate
  modified_base 20: mod_base = OTHER; note = 2'-O-methyladenosine-3'-phosphate
  modified_base 21: mod_base = OTHER; note = 2'-O-methyluridine-3'-phosphorothioate
  modified_base 22: mod_base = OTHER; note = 2'-O-methylcytidine-3'-phosphorothioate
  modified_base 23: mod_base = OTHER; note = 2'-O-methyladenosine-3'-phosphate
aagagactggctttcatcgatca

SEQ ID NO: 1355 - RNA, 23 nt, synthetic construct
  misc_feature 1..23: note = Description of Artificial Sequence: Synthetic oligonucleotide
  source 1..23: mol_type = other RNA
  modified_base 1: mod_base = OTHER; note = 2'-O-methyladenosine-3'-phosphorothioate
  modified_base 2: mod_base = OTHER; note = 2'-fluoroadenosine-3'-phosphorothioate
  modified_base 3: mod_base = OTHER; note = 2'-O-methyluridine-3'-phosphate
  modified_base 4: mod_base = OTHER; note = 2'-O-methylguanosine-3'-phosphate
  modified_base 5: mod_base = OTHER; note = 2'-O-methylcytidine-3'-phosphate
  modified_base 6: mod_base = OTHER; note = 2'-fluorocytidine-3'-phosphate
  modified_base 7: mod_base = OTHER; note = 2'-O-methyladenosine-3'-phosphate
  modified_base 8: mod_base = OTHER; note = 2'-fluorocytidine-3'-phosphate
  modified_base 9: mod_base = OTHER; note = 2'-fluoroadenosine-3'-phosphate
  modified_base 10: mod_base = OTHER; note = 2'-O-methylguanosine-3'-phosphate
  modified_base 11: mod_base = OTHER; note = 2'-O-methyladenosine-3'-phosphate
  modified_base 12: mod_base = OTHER; note = 2'-O-methylguanosine-3'-phosphate
  modified_base 13: mod_base = OTHER; note = 2'-O-methyladenosine-3'-phosphate
  modified_base 14: mod_base = OTHER; note = 2'-fluorocytidine-3'-phosphate
  modified_base 15: mod_base = OTHER; note = 2'-O-methyluridine-3'-phosphate
  modified_base 16: mod_base = OTHER; note = 2'-fluorocytidine-3'-phosphate
  modified_base 17: mod_base = OTHER; note = 2'-O-methyladenosine-3'-phosphate
  modified_base 18: mod_base = OTHER; note = 2'-O-methylguanosine-3'-phosphate
  modified_base 19: mod_base = OTHER; note = 2'-O-methyladenosine-3'-phosphate
  modified_base 20: mod_base = OTHER; note = 2'-O-methylguanosine-3'-phosphate
  modified_base 21: mod_base = OTHER; note = 2'-O-methyladenosine-3'-phosphorothioate
  modified_base 22: mod_base = OTHER; note = 2'-O-methylcytidine-3'-phosphorothioate
  modified_base 23: mod_base = OTHER; note = 2'-O-methyluridine-3'-phosphate
aatgccacagagactcagagact

SEQ ID NO: 1356 - RNA, 23 nt, synthetic construct
  misc_feature 1..23: note = Description of Artificial Sequence: Synthetic oligonucleotide
  source 1..23: mol_type = other RNA
  modified_base 1: mod_base = OTHER; note = 2'-O-methyladenosine-3'-phosphorothioate
  modified_base 2: mod_base = OTHER; note = 2'-fluoroguanosine-3'-phosphorothioate
  modified_base 3: mod_base = OTHER; note = 2'-O-methyluridine-3'-phosphate
  modified_base 4: mod_base = OTHER; note = 2'-O-methyladenosine-3'-phosphate
  modified_base 5: mod_base = OTHER; note = 2'-O-methylcytidine-3'-phosphate
  modified_base 6: mod_base = OTHER; note = 2'-fluorocytidine-3'-phosphate
  modified_base 7: mod_base = OTHER; note = 2'-O-methylcytidine-3'-phosphate
  modified_base 8: mod_base = OTHER; note = 2'-fluorouridine-3'-phosphate
  modified_base 9: mod_base = OTHER; note = 2'-fluorouridine-3'-phosphate
  modified_base 10: mod_base = OTHER; note = 2'-O-methylcytidine-3'-phosphate
  modified_base 11: mod_base = OTHER; note = 2'-O-methylcytidine-3'-phosphate
  modified_base 12: mod_base = OTHER; note = 2'-O-methyluridine-3'-phosphate
  modified_base 13: mod_base = OTHER; note = 2'-O-methylguanosine-3'-phosphate
  modified_base 14: mod_base = OTHER; note = 2'-fluorouridine-3'-phosphate
  modified_base 15: mod_base = OTHER; note = 2'-O-methylguanosine-3'-phosphate
  modified_base 16: mod_base = OTHER; note = 2'-fluorouridine-3'-phosphate
  modified_base 17: mod_base = OTHER; note = 2'-O-methyluridine-3'-phosphate
  modified_base 18: mod_base = OTHER; note = 2'-O-methylcytidine-3'-phosphate
  modified_base 19: mod_base = OTHER; note = 2'-O-methylcytidine-3'-phosphate
  modified_base 20: mod_base = OTHER; note = 2'-O-methylcytidine-3'-phosphate
  modified_base 21: mod_base = OTHER; note = 2'-O-methyladenosine-3'-phosphorothioate
  modified_base 22: mod_base = OTHER; note = 2'-O-methyladenosine-3'-phosphorothioate
  modified_base 23: mod_base = OTHER; note = 2'-O-methyladenosine-3'-phosphate
agtacccttcctgtgttcccaaa

SEQ ID NO: 1357 - RNA, 23 nt, synthetic construct
  misc_feature 1..23: note = Description of Artificial Sequence: Synthetic oligonucleotide
  source 1..23: mol_type = other RNA
  modified_base 1: mod_base = OTHER; note = 2'-O-methyladenosine-3'-phosphorothioate
  modified_base 2: mod_base = OTHER; note = 2'-fluoroadenosine-3'-phosphorothioate
  modified_base 3: mod_base = OTHER; note = 2'-O-methyluridine-3'-phosphate
  modified_base 4: mod_base = OTHER; note = 2'-O-methylguanosine-3'-phosphate
  modified_base 5: mod_base = OTHER; note = 2'-O-methylguanosine-3'-phosphate
  modified_base 6: mod_base = OTHER; note = 2'-fluorouridine-3'-phosphate
  modified_base 7: mod_base = OTHER; note = 2'-O-methyluridine-3'-phosphate
  modified_base 8: mod_base = OTHER; note = 2'-fluoroguanosine-3'-phosphate
  modified_base 9: mod_base = OTHER; note = 2'-fluorocytidine-3'-phosphate
  modified_base 10: mod_base = OTHER; note = 2'-O-methyluridine-3'-phosphate
  modified_base 11: mod_base = OTHER; note = 2'-O-methyluridine-3'-phosphate
  modified_base 12: mod_base = OTHER; note = 2'-O-methylguanosine-3'-phosphate
  modified_base 13: mod_base = OTHER; note = 2'-O-methyluridine-3'-phosphate
  modified_base 14: mod_base = OTHER; note = 2'-fluoroguanosine-3'-phosphate
  modified_base 15: mod_base = OTHER; note = 2'-O-methylguanosine-3'-phosphate
  modified_base 16: mod_base = OTHER; note = 2'-fluorouridine-3'-phosphate
  modified_base 17: mod_base = OTHER; note = 2'-O-methyladenosine-3'-phosphate
  modified_base 18: mod_base = OTHER; note = 2'-O-methyladenosine-3'-phosphate
  modified_base 19: mod_base = OTHER; note = 2'-O-methyluridine-3'-phosphate
  modified_base 20: mod_base = OTHER; note = 2'-O-methylcytidine-3'-phosphate
  modified_base 21: mod_base = OTHER; note = 2'-O-methylguanosine-3'-phosphorothioate
  modified_base 22: mod_base = OTHER; note = 2'-O-methylguanosine-3'-phosphorothioate
  modified_base 23: mod_base = OTHER; note = 2'-O-methyluridine-3'-phosphate
aatggttgcttgtggtaatcggt

SEQ ID NO: 1358 - RNA, 23 nt, synthetic construct
  misc_feature 1..23: note = Description of Artificial Sequence: Synthetic oligonucleotide
  source 1..23: mol_type = other RNA
  modified_base 1: mod_base = OTHER; note = 2'-O-methyladenosine-3'-phosphorothioate
  modified_base 2: mod_base = OTHER; note = 2'-fluorouridine -3'-phosphorothioate
  modified_base 3: mod_base = OTHER; note = 2'-O-methyluridine-3'-phosphate
  modified_base 4: mod_base = OTHER; note = 2'-O-methyluridine-3'-phosphate
  modified_base 5: mod_base = OTHER; note = 2'-O-methylguanosine-3'-phosphate
  modified_base 6: mod_base = OTHER; note = 2'-fluoroadenosine-3'-phosphate
  modified_base 7: mod_base = OTHER; note = 2'-O-methyladenosine-3'-phosphate
  modified_base 8: mod_base = OTHER; note = 2'-fluoroguanosine-3'-phosphate
  modified_base 9: mod_base = OTHER; note = 2'-fluoroguanosine-3'-phosphate
  modified_base 10: mod_base = OTHER; note = 2'-O-methylguanosine-3'-phosphate
  modified_base 11: mod_base = OTHER; note = 2'-O-methylcytidine-3'-phosphate
  modified_base 12: mod_base = OTHER; note = 2'-O-methylguanosine-3'-phosphate
  modified_base 13: mod_base = OTHER; note = 2'-O-methyladenosine-3'-phosphate
  modified_base 14: mod_base = OTHER; note = 2'-fluoroadenosine-3'-phosphate
  modified_base 15: mod_base = OTHER; note = 2'-O-methyluridine-3'-phosphate
  modified_base 16: mod_base = OTHER; note = 2'-fluoroguanosine-3'-phosphate
  modified_base 17: mod_base = OTHER; note = 2'-O-methyladenosine-3'-phosphate
  modified_base 18: mod_base = OTHER; note = 2'-O-methylcytidine-3'-phosphate
  modified_base 19: mod_base = OTHER; note = 2'-O-methyluridine-3'-phosphate
  modified_base 20: mod_base = OTHER; note = 2'-O-methylguanosine-3'-phosphate
  modified_base 21: mod_base = OTHER; note = 2'-O-methyladenosine-3'-phosphorothioate
  modified_base 22: mod_base = OTHER; note = 2'-O-methylguanosine-3'-phosphorothioate
  modified_base 23: mod_base = OTHER; note = 2'-O-methyladenosine-3'-phosphate
atttgaagggcgaatgactgaga

SEQ ID NO: 1359 - RNA, 23 nt, synthetic construct
  misc_feature 1..23: note = Description of Artificial Sequence: Synthetic oligonucleotide
  source 1..23: mol_type = other RNA
  modified_base 1: mod_base = OTHER; note = 2'-O-methyladenosine-3'-phosphorothioate
  modified_base 2: mod_base = OTHER; note = 2'-fluorocytidine-3'-phosphorothioate
  modified_base 3: mod_base = OTHER; note = 2'-O-methylcytidine-3'-phosphate
  modified_base 4: mod_base = OTHER; note = 2'-O-methyladenosine-3'-phosphate
  modified_base 5: mod_base = OTHER; note = 2'-O-methyluridine-3'-phosphate
  modified_base 6: mod_base = OTHER; note = 2'-fluoroadenosine-3'-phosphate
  modified_base 7: mod_base = OTHER; note = 2'-O-methylcytidine-3'-phosphate
  modified_base 8: mod_base = OTHER; note = 2'-fluoroadenosine-3'-phosphate
  modified_base 9: mod_base = OTHER; note = 2'-fluoroguanosine-3'-phosphate
  modified_base 10: mod_base = OTHER; note = 2'-O-methylcytidine-3'-phosphate
  modified_base 11: mod_base = OTHER; note = 2'-O-methyluridine-3'-phosphate
  modified_base 12: mod_base = OTHER; note = 2'-O-methylcytidine-3'-phosphate
  modified_base 13: mod_base = OTHER; note = 2'-O-methyluridine-3'-phosphate
  modified_base 14: mod_base = OTHER; note = 2'-fluorocytidine-3'-phosphate
  modified_base 15: mod_base = OTHER; note = 2'-O-methylguanosine-3'-phosphate
  modified_base 16: mod_base = OTHER; note = 2'-fluorouridine-3'-phosphate
  modified_base 17: mod_base = OTHER; note = 2'-O-methylguanosine-3'-phosphate
  modified_base 18: mod_base = OTHER; note = 2'-O-methyluridine-3'-phosphate
  modified_base 19: mod_base = OTHER; note = 2'-O-methylcytidine-3'-phosphate
  modified_base 20: mod_base = OTHER; note = 2'-O-methylcytidine-3'-phosphate
  modified_base 21: mod_base = OTHER; note = 2'-O-methylcytidine-3'-phosphorothioate
  modified_base 22: mod_base = OTHER; note = 2'-O-methyluridine-3'-phosphorothioate
  modified_base 23: mod_base = OTHER; note = 2'-O-methyluridine-3'-phosphate
accatacagctctcgtgtccctt

SEQ ID NO: 1360 - RNA, 23 nt, synthetic construct
  misc_feature 1..23: note = Description of Artificial Sequence: Synthetic oligonucleotide
  source 1..23: mol_type = other RNA
  modified_base 1: mod_base = OTHER; note = 2'-O-methyladenosine-3'-phosphorothioate
  modified_base 2: mod_base = OTHER; note = 2'-fluoroadenosine-3'-phosphorothioate
  modified_base 3: mod_base = OTHER; note = 2'-O-methylguanosine-3'-phosphate
  modified_base 4: mod_base = OTHER; note = 2'-O-methyluridine-3'-phosphate
  modified_base 5: mod_base = OTHER; note = 2'-O-methylguanosine-3'-phosphate
  modified_base 6: mod_base = OTHER; note = 2'-fluoroadenosine-3'-phosphate
  modified_base 7: mod_base = OTHER; note = 2'-O-methyladenosine-3'-phosphate
  modified_base 8: mod_base = OTHER; note = 2'-fluoroadenosine-3'-phosphate
  modified_base 9: mod_base = OTHER; note = 2'-fluorocytidine-3'-phosphate
  modified_base 10: mod_base = OTHER; note = 2'-O-methyladenosine-3'-phosphate
  modified_base 11: mod_base = OTHER; note = 2'-O-methyladenosine-3'-phosphate
  modified_base 12: mod_base = OTHER; note = 2'-O-methyluridine-3'-phosphate
  modified_base 13: mod_base = OTHER; note = 2'-O-methylguanosine-3'-phosphate
  modified_base 14: mod_base = OTHER; note = 2'-fluorouridine-3'-phosphate
  modified_base 15: mod_base = OTHER; note = 2'-O-methylguanosine-3'-phosphate
  modified_base 16: mod_base = OTHER; note = 2'-fluorocytidine-3'-phosphate
  modified_base 17: mod_base = OTHER; note = 2'-O-methyluridine-3'-phosphate
  modified_base 18: mod_base = OTHER; note = 2'-O-methylguanosine-3'-phosphate
  modified_base 19: mod_base = OTHER; note = 2'-O-methylcytidine-3'-phosphate
  modified_base 20: mod_base = OTHER; note = 2'-O-methyluridine-3'-phosphate
  modified_base 21: mod_base = OTHER; note = 2'-O-methylguanosine-3'-phosphorothioate
  modified_base 22: mod_base = OTHER; note = 2'-O-methyluridine-3'-phosphorothioate
  modified_base 23: mod_base = OTHER; note = 2'-O-methylcytidine-3'-phosphate
aagtgaaacaatgtgctgctgtc

SEQ ID NO: 1361 - RNA, 23 nt, synthetic construct
  misc_feature 1..23: note = Description of Artificial Sequence: Synthetic oligonucleotide
  source 1..23: mol_type = other RNA
  modified_base 1: mod_base = OTHER; note = 2'-O-methyladenosine-3'-phosphorothioate
  modified_base 2: mod_base = OTHER; note = 2'-fluoroadenosine-3'-phosphorothioate
  modified_base 3: mod_base = OTHER; note = 2'-O-methylcytidine-3'-phosphate
  modified_base 4: mod_base = OTHER; note = 2'-O-methylcytidine-3'-phosphate
  modified_base 5: mod_base = OTHER; note = 2'-O-methyluridine-3'-phosphate
  modified_base 6: mod_base = OTHER; note = 2'-fluorouridine-3'-phosphate
  modified_base 7: mod_base = OTHER; note = 2'-O-methylguanosine-3'-phosphate
  modified_base 8: mod_base = OTHER; note = 2'-fluoroadenosine-3'-phosphate
  modified_base 9: mod_base = OTHER; note = 2'-fluorouridine-3'-phosphate
  modified_base 10: mod_base = OTHER; note = 2'-O-methyluridine-3'-phosphate
  modified_base 11: mod_base = OTHER; note = 2'-O-methylguanosine-3'-phosphate
  modified_base 12: mod_base = OTHER; note = 2'-O-methyladenosine-3'-phosphate
  modified_base 13: mod_base = OTHER; note = 2'-O-methylguanosine-3'-phosphate
  modified_base 14: mod_base = OTHER; note = 2'-fluorouridine-3'-phosphate
  modified_base 15: mod_base = OTHER; note = 2'-O-methylguanosine-3'-phosphate
  modified_base 16: mod_base = OTHER; note = 2'-fluorouridine-3'-phosphate
  modified_base 17: mod_base = OTHER; note = 2'-O-methyluridine-3'-phosphate
  modified_base 18: mod_base = OTHER; note = 2'-O-methylcytidine-3'-phosphate
  modified_base 19: mod_base = OTHER; note = 2'-O-methylcytidine-3'-phosphate
  modified_base 20: mod_base = OTHER; note = 2'-O-methyluridine-3'-phosphate
  modified_base 21: mod_base = OTHER; note = 2'-O-methyluridine-3'-phosphorothioate
  modified_base 22: mod_base = OTHER; note = 2'-O-methylguanosine-3'-phosphorothioate
  modified_base 23: mod_base = OTHER; note = 2'-O-methyluridine-3'-phosphate
aaccttgattgagtgttccttgt

SEQ ID NO: 1362 - RNA, 23 nt, synthetic construct
  misc_feature 1..23: note = Description of Artificial Sequence: Synthetic oligonucleotide
  source 1..23: mol_type = other RNA
  modified_base 1: mod_base = OTHER; note = 2'-O-methyladenosine-3'-phosphorothioate
  modified_base 2: mod_base = OTHER; note = 2'-fluoroguanosine-3'-phosphorothioate
  modified_base 3: mod_base = OTHER; note = 2'-O-methyluridine-3'-phosphate
  modified_base 4: mod_base = OTHER; note = 2'-O-methylguanosine-3'-phosphate
  modified_base 5: mod_base = OTHER; note = 2'-O-methyladenosine-3'-phosphate
  modified_base 6: mod_base = OTHER; note = 2'-fluoroadenosine-3'-phosphate
  modified_base 7: mod_base = OTHER; note = 2'-O-methyladenosine-3'-phosphate
  modified_base 8: mod_base = OTHER; note = 2'-fluorouridine-3'-phosphate
  modified_base 9: mod_base = OTHER; note = 2'-fluoroadenosine-3'-phosphate
  modified_base 10: mod_base = OTHER; note = 2'-O-methylguanosine-3'-phosphate
  modified_base 11: mod_base = OTHER; note = 2'-O-methylguanosine-3'-phosphate
  modified_base 12: mod_base = OTHER; note = 2'-O-methyladenosine-3'-phosphate
  modified_base 13: mod_base = OTHER; note = 2'-O-methylcytidine-3'-phosphate
  modified_base 14: mod_base = OTHER; note = 2'-fluorouridine-3'-phosphate
  modified_base 15: mod_base = OTHER; note = 2'-O-methyladenosine-3'-phosphate
  modified_base 16: mod_base = OTHER; note = 2'-fluorocytidine-3'-phosphate
  modified_base 17: mod_base = OTHER; note = 2'-O-methyluridine-3'-phosphate
  modified_base 18: mod_base = OTHER; note = 2'-O-methyluridine-3'-phosphate
  modified_base 19: mod_base = OTHER; note = 2'-O-methylcytidine-3'-phosphate
  modified_base 20: mod_base = OTHER; note = 2'-O-methyluridine-3'-phosphate
  modified_base 21: mod_base = OTHER; note = 2'-O-methyladenosine-3'-phosphorothioate
  modified_base 22: mod_base = OTHER; note = 2'-O-methyluridine-3'-phosphorothioate
  modified_base 23: mod_base = OTHER; note = 2'-O-methylcytidine-3'-phosphate
agtgaaataggactacttctatc

SEQ ID NO: 1363 - RNA, 23 nt, synthetic construct
  misc_feature 1..23: note = Description of Artificial Sequence: Synthetic oligonucleotide
  source 1..23: mol_type = other RNA
  modified_base 1: mod_base = OTHER; note = 2'-O-methyladenosine-3'-phosphorothioate
  modified_base 2: mod_base = OTHER; note = 2'-fluorouridine -3'-phosphorothioate
  modified_base 3: mod_base = OTHER; note = 2'-O-methylcytidine-3'-phosphate
  modified_base 4: mod_base = OTHER; note = 2'-O-methylcytidine-3'-phosphate
  modified_base 5: mod_base = OTHER; note = 2'-O-methylcytidine-3'-phosphate
  modified_base 6: mod_base = OTHER; note = 2'-fluoroadenosine-3'-phosphate
  modified_base 7: mod_base = OTHER; note = 2'-O-methyluridine-3'-phosphate
  modified_base 8: mod_base = OTHER; note = 2'-fluorouridine-3'-phosphate
  modified_base 9: mod_base = OTHER; note = 2'-fluoroadenosine-3'-phosphate
  modified_base 10: mod_base = OTHER; note = 2'-O-methyladenosine-3'-phosphate
  modified_base 11: mod_base = OTHER; note = 2'-O-methyluridine-3'-phosphate
  modified_base 12: mod_base = OTHER; note = 2'-O-methylguanosine-3'-phosphate
  modified_base 13: mod_base = OTHER; note = 2'-O-methyluridine-3'-phosphate
  modified_base 14: mod_base = OTHER; note = 2'-fluorouridine-3'-phosphate
  modified_base 15: mod_base = OTHER; note = 2'-O-methylguanosine-3'-phosphate
  modified_base 16: mod_base = OTHER; note = 2'-fluorouridine-3'-phosphate
  modified_base 17: mod_base = OTHER; note = 2'-O-methyladenosine-3'-phosphate
  modified_base 18: mod_base = OTHER; note = 2'-O-methylguanosine-3'-phosphate
  modified_base 19: mod_base = OTHER; note = 2'-O-methyluridine-3'-phosphate
  modified_base 20: mod_base = OTHER; note = 2'-O-methyluridine-3'-phosphate
  modified_base 21: mod_base = OTHER; note = 2'-O-methylguanosine-3'-phosphorothioate
  modified_base 22: mod_base = OTHER; note = 2'-O-methylguanosine-3'-phosphorothioate
  modified_base 23: mod_base = OTHER; note = 2'-O-methylguanosine-3'-phosphate
atcccattaatgttgtagttggg

SEQ ID NO: 1364 - RNA, 23 nt, synthetic construct
  misc_feature 1..23: note = Description of Artificial Sequence: Synthetic oligonucleotide
  source 1..23: mol_type = other RNA
  modified_base 1: mod_base = OTHER; note = 2'-O-methyladenosine-3'-phosphorothioate
  modified_base 2: mod_base = OTHER; note = 2'-fluorouridine -3'-phosphorothioate
  modified_base 3: mod_base = OTHER; note = 2'-O-methyluridine-3'-phosphate
  modified_base 4: mod_base = OTHER; note = 2'-O-methylguanosine-3'-phosphate
  modified_base 5: mod_base = OTHER; note = 2'-O-methyladenosine-3'-phosphate
  modified_base 6: mod_base = OTHER; note = 2'-fluorouridine-3'-phosphate
  modified_base 7: mod_base = OTHER; note = 2'-O-methylcytidine-3'-phosphate
  modified_base 8: mod_base = OTHER; note = 2'-fluoroadenosine-3'-phosphate
  modified_base 9: mod_base = OTHER; note = 2'-fluoroguanosine-3'-phosphate
  modified_base 10: mod_base = OTHER; note = 2'-O-methylguanosine-3'-phosphate
  modified_base 11: mod_base = OTHER; note = 2'-O-methylguanosine-3'-phosphate
  modified_base 12: mod_base = OTHER; note = 2'-O-methylcytidine-3'-phosphate
  modified_base 13: mod_base = OTHER; note = 2'-O-methyladenosine-3'-phosphate
  modified_base 14: mod_base = OTHER; note = 2'-fluoroadenosine-3'-phosphate
  modified_base 15: mod_base = OTHER; note = 2'-O-methylcytidine-3'-phosphate
  modified_base 16: mod_base = OTHER; note = 2'-fluoroguanosine-3'-phosphate
  modified_base 17: mod_base = OTHER; note = 2'-O-methyluridine-3'-phosphate
  modified_base 18: mod_base = OTHER; note = 2'-O-methylcytidine-3'-phosphate
  modified_base 19: mod_base = OTHER; note = 2'-O-methyladenosine-3'-phosphate
  modified_base 20: mod_base = OTHER; note = 2'-O-methyluridine-3'-phosphate
  modified_base 21: mod_base = OTHER; note = 2'-O-methyladenosine-3'-phosphorothioate
  modified_base 22: mod_base = OTHER; note = 2'-O-methylguanosine-3'-phosphorothioate
  modified_base 23: mod_base = OTHER; note = 2'-O-methyluridine-3'-phosphate
attgatcagggcaacgtcatagt

SEQ ID NO: 1365 - RNA, 23 nt, synthetic construct
  misc_feature 1..23: note = Description of Artificial Sequence: Synthetic oligonucleotide
  source 1..23: mol_type = other RNA
  modified_base 1: mod_base = OTHER; note = 2'-O-methyladenosine-3'-phosphorothioate
  modified_base 2: mod_base = OTHER; note = 2'-fluoroadenosine-3'-phosphorothioate
  modified_base 3: mod_base = OTHER; note = 2'-O-methyluridine-3'-phosphate
  modified_base 4: mod_base = OTHER; note = 2'-O-methyluridine-3'-phosphate
  modified_base 5: mod_base = OTHER; note = 2'-O-methyluridine-3'-phosphate
  modified_base 6: mod_base = OTHER; note = 2'-fluorocytidine-3'-phosphate
  modified_base 7: mod_base = OTHER; note = 2'-O-methyladenosine-3'-phosphate
  modified_base 8: mod_base = OTHER; note = 2'-fluoroguanosine-3'-phosphate
  modified_base 9: mod_base = OTHER; note = 2'-fluorocytidine-3'-phosphate
  modified_base 10: mod_base = OTHER; note = 2'-O-methyluridine-3'-phosphate
  modified_base 11: mod_base = OTHER; note = 2'-O-methyluridine-3'-phosphate
  modified_base 12: mod_base = OTHER; note = 2'-O-methyladenosine-3'-phosphate
  modified_base 13: mod_base = OTHER; note = 2'-O-methyluridine-3'-phosphate
  modified_base 14: mod_base = OTHER; note = 2'-fluorouridine-3'-phosphate
  modified_base 15: mod_base = OTHER; note = 2'-O-methylcytidine-3'-phosphate
  modified_base 16: mod_base = OTHER; note = 2'-fluorouridine-3'-phosphate
  modified_base 17: mod_base = OTHER; note = 2'-O-methyluridine-3'-phosphate
  modified_base 18: mod_base = OTHER; note = 2'-O-methylguanosine-3'-phosphate
  modified_base 19: mod_base = OTHER; note = 2'-O-methyladenosine-3'-phosphate
  modified_base 20: mod_base = OTHER; note = 2'-O-methylguanosine-3'-phosphate
  modified_base 21: mod_base = OTHER; note = 2'-O-methylcytidine-3'-phosphorothioate
  modified_base 22: mod_base = OTHER; note = 2'-O-methyluridine-3'-phosphorothioate
  modified_base 23: mod_base = OTHER; note = 2'-O-methyluridine-3'-phosphate
aatttcagcttattcttgagctt

SEQ ID NO: 1366 - RNA, 23 nt, synthetic construct
  misc_feature 1..23: note = Description of Artificial Sequence: Synthetic oligonucleotide
  source 1..23: mol_type = other RNA
  modified_base 1: mod_base = OTHER; note = 2'-O-methyladenosine-3'-phosphorothioate
  modified_base 2: mod_base = OTHER; note = 2'-fluorocytidine-3'-phosphorothioate
  modified_base 3: mod_base = OTHER; note = 2'-O-methyladenosine-3'-phosphate
  modified_base 4: mod_base = OTHER; note = 2'-O-methyladenosine-3'-phosphate
  modified_base 5: mod_base = OTHER; note = 2'-O-methyladenosine-3'-phosphate
  modified_base 6: mod_base = OTHER; note = 2'-fluoroguanosine-3'-phosphate
  modified_base 7: mod_base = OTHER; note = 2'-O-methylcytidine-3'-phosphate
  modified_base 8: mod_base = OTHER; note = 2'-fluorouridine-3'-phosphate
  modified_base 9: mod_base = OTHER; note = 2'-fluorocytidine-3'-phosphate
  modified_base 10: mod_base = OTHER; note = 2'-O-methylguanosine-3'-phosphate
  modified_base 11: mod_base = OTHER; note = 2'-O-methyladenosine-3'-phosphate
  modified_base 12: mod_base = OTHER; note = 2'-O-methylguanosine-3'-phosphate
  modified_base 13: mod_base = OTHER; note = 2'-O-methyluridine-3'-phosphate
  modified_base 14: mod_base = OTHER; note = 2'-fluorouridine-3'-phosphate
  modified_base 15: mod_base = OTHER; note = 2'-O-methylguanosine-3'-phosphate
  modified_base 16: mod_base = OTHER; note = 2'-fluorouridine-3'-phosphate
  modified_base 17: mod_base = OTHER; note = 2'-O-methyluridine-3'-phosphate
  modified_base 18: mod_base = OTHER; note = 2'-O-methylcytidine-3'-phosphate
  modified_base 19: mod_base = OTHER; note = 2'-O-methylcytidine-3'-phosphate
  modified_base 20: mod_base = OTHER; note = 2'-O-methylcytidine-3'-phosphate
  modified_base 21: mod_base = OTHER; note = 2'-O-methyluridine-3'-phosphorothioate
  modified_base 22: mod_base = OTHER; note = 2'-O-methylcytidine-3'-phosphorothioate
  modified_base 23: mod_base = OTHER; note = 2'-O-methylguanosine-3'-phosphate
acaaagctcgagttgttccctcg

SEQ ID NO: 1367 - RNA, 23 nt, synthetic construct
  misc_feature 1..23: note = Description of Artificial Sequence: Synthetic oligonucleotide
  source 1..23: mol_type = other RNA
  modified_base 1: mod_base = OTHER; note = 2'-O-methyladenosine-3'-phosphorothioate
  modified_base 2: mod_base = OTHER; note = 2'-fluoroguanosine-3'-phosphorothioate
  modified_base 3: mod_base = OTHER; note = 2'-O-methylcytidine-3'-phosphate
  modified_base 4: mod_base = OTHER; note = 2'-O-methyladenosine-3'-phosphate
  modified_base 5: mod_base = OTHER; note = 2'-O-methyladenosine-3'-phosphate
  modified_base 6: mod_base = OTHER; note = 2'-fluoroguanosine-3'-phosphate
  modified_base 7: mod_base = OTHER; note = 2'-O-methyluridine-3'-phosphate
  modified_base 8: mod_base = OTHER; note = 2'-fluoroguanosine-3'-phosphate
  modified_base 9: mod_base = OTHER; note = 2'-fluoroguanosine-3'-phosphate
  modified_base 10: mod_base = OTHER; note = 2'-O-methyluridine-3'-phosphate
  modified_base 11: mod_base = OTHER; note = 2'-O-methyladenosine-3'-phosphate
  modified_base 12: mod_base = OTHER; note = 2'-O-methylguanosine-3'-phosphate
  modified_base 13: mod_base = OTHER; note = 2'-O-methyluridine-3'-phosphate
  modified_base 14: mod_base = OTHER; note = 2'-fluorouridine-3'-phosphate
  modified_base 15: mod_base = OTHER; note = 2'-O-methylguanosine-3'-phosphate
  modified_base 16: mod_base = OTHER; note = 2'-fluoroguanosine-3'-phosphate
  modified_base 17: mod_base = OTHER; note = 2'-O-methyladenosine-3'-phosphate
  modified_base 18: mod_base = OTHER; note = 2'-O-methylguanosine-3'-phosphate
  modified_base 19: mod_base = OTHER; note = 2'-O-methylguanosine-3'-phosphate
  modified_base 20: mod_base = OTHER; note = 2'-O-methyladenosine-3'-phosphate
  modified_base 21: mod_base = OTHER; note = 2'-O-methyladenosine-3'-phosphorothioate
  modified_base 22: mod_base = OTHER; note = 2'-O-methylguanosine-3'-phosphorothioate
  modified_base 23: mod_base = OTHER; note = 2'-O-methylcytidine-3'-phosphate
agcaagtggtagttggaggaagc

SEQ ID NO: 1368 - RNA, 23 nt, synthetic construct
  misc_feature 1..23: note = Description of Artificial Sequence: Synthetic oligonucleotide
  source 1..23: mol_type = other RNA
  modified_base 1: mod_base = OTHER; note = 2'-O-methyladenosine-3'-phosphorothioate
  modified_base 2: mod_base = OTHER; note = 2'-fluorouridine -3'-phosphorothioate
  modified_base 3: mod_base = OTHER; note = 2'-O-methyluridine-3'-phosphate
  modified_base 4: mod_base = OTHER; note = 2'-O-methylcytidine-3'-phosphate
  modified_base 5: mod_base = OTHER; note = 2'-O-methylcytidine-3'-phosphate
  modified_base 6: mod_base = OTHER; note = 2'-fluorouridine-3'-phosphate
  modified_base 7: mod_base = OTHER; note = 2'-O-methyluridine-3'-phosphate
  modified_base 8: mod_base = OTHER; note = 2'-fluorouridine-3'-phosphate
  modified_base 9: mod_base = OTHER; note = 2'-fluorouridine-3'-phosphate
  modified_base 10: mod_base = OTHER; note = 2'-O-methylguanosine-3'-phosphate
  modified_base 11: mod_base = OTHER; note = 2'-O-methyluridine-3'-phosphate
  modified_base 12: mod_base = OTHER; note = 2'-O-methyluridine-3'-phosphate
  modified_base 13: mod_base = OTHER; note = 2'-O-methylguanosine-3'-phosphate
  modified_base 14: mod_base = OTHER; note = 2'-fluorocytidine-3'-phosphate
  modified_base 15: mod_base = OTHER; note = 2'-O-methyluridine-3'-phosphate
  modified_base 16: mod_base = OTHER; note = 2'-fluoroguanosine-3'-phosphate
  modified_base 17: mod_base = OTHER; note = 2'-O-methylguanosine-3'-phosphate
  modified_base 18: mod_base = OTHER; note = 2'-O-methylcytidine-3'-phosphate
  modified_base 19: mod_base = OTHER; note = 2'-O-methyladenosine-3'-phosphate
  modified_base 20: mod_base = OTHER; note = 2'-O-methyladenosine-3'-phosphate
  modified_base 21: mod_base = OTHER; note = 2'-O-methylguanosine-3'-phosphorothioate
  modified_base 22: mod_base = OTHER; note = 2'-O-methyluridine-3'-phosphorothioate
  modified_base 23: mod_base = OTHER; note = 2'-O-methylguanosine-3'-phosphate
attccttttgttgctggcaagtg

SEQ ID NO: 1369 - RNA, 23 nt, synthetic construct
  misc_feature 1..23: note = Description of Artificial Sequence: Synthetic oligonucleotide
  source 1..23: mol_type = other RNA
  modified_base 1: mod_base = OTHER; note = 2'-O-methyladenosine-3'-phosphorothioate
  modified_base 2: mod_base = OTHER; note = 2'-fluoroadenosine-3'-phosphorothioate
  modified_base 3: mod_base = OTHER; note = 2'-O-methyladenosine-3'-phosphate
  modified_base 4: mod_base = OTHER; note = 2'-O-methylcytidine-3'-phosphate
  modified_base 5: mod_base = OTHER; note = 2'-O-methyladenosine-3'-phosphate
  modified_base 6: mod_base = OTHER; note = 2'-fluoroguanosine-3'-phosphate
  modified_base 7: mod_base = OTHER; note = 2'-O-methyladenosine-3'-phosphate
  modified_base 8: mod_base = OTHER; note = 2'-fluoroguanosine-3'-phosphate
  modified_base 9: mod_base = OTHER; note = 2'-fluorocytidine-3'-phosphate
  modified_base 10: mod_base = OTHER; note = 2'-O-methyluridine-3'-phosphate
  modified_base 11: mod_base = OTHER; note = 2'-O-methyluridine-3'-phosphate
  modified_base 12: mod_base = OTHER; note = 2'-O-methyluridine-3'-phosphate
  modified_base 13: mod_base = OTHER; note = 2'-O-methylguanosine-3'-phosphate
  modified_base 14: mod_base = OTHER; note = 2'-fluoroadenosine-3'-phosphate
  modified_base 15: mod_base = OTHER; note = 2'-O-methyluridine-3'-phosphate
  modified_base 16: mod_base = OTHER; note = 2'-fluoroadenosine-3'-phosphate
  modified_base 17: mod_base = OTHER; note = 2'-O-methyluridine-3'-phosphate
  modified_base 18: mod_base = OTHER; note = 2'-O-methylcytidine-3'-phosphate
  modified_base 19: mod_base = OTHER; note = 2'-O-methylcytidine-3'-phosphate
  modified_base 20: mod_base = OTHER; note = 2'-O-methyluridine-3'-phosphate
  modified_base 21: mod_base = OTHER; note = 2'-O-methylguanosine-3'-phosphorothioate
  modified_base 22: mod_base = OTHER; note = 2'-O-methyluridine-3'-phosphorothioate
  modified_base 23: mod_base = OTHER; note = 2'-O-methylguanosine-3'-phosphate
aaacagagctttgatatcctgtg

SEQ ID NO: 1370 - RNA, 23 nt, synthetic construct
  misc_feature 1..23: note = Description of Artificial Sequence: Synthetic oligonucleotide
  source 1..23: mol_type = other RNA
  modified_base 1: mod_base = OTHER; note = 2'-O-methyladenosine-3'-phosphorothioate
  modified_base 2: mod_base = OTHER; note = 2'-fluorouridine -3'-phosphorothioate
  modified_base 3: mod_base = OTHER; note = 2'-O-methyluridine-3'-phosphate
  modified_base 4: mod_base = OTHER; note = 2'-O-methyluridine-3'-phosphate
  modified_base 5: mod_base = OTHER; note = 2'-O-methylcytidine-3'-phosphate
  modified_base 6: mod_base = OTHER; note = 2'-fluorouridine-3'-phosphate
  modified_base 7: mod_base = OTHER; note = 2'-O-methylcytidine-3'-phosphate
  modified_base 8: mod_base = OTHER; note = 2'-fluorocytidine-3'-phosphate
  modified_base 9: mod_base = OTHER; note = 2'-fluorouridine-3'-phosphate
  modified_base 10: mod_base = OTHER; note = 2'-O-methylcytidine-3'-phosphate
  modified_base 11: mod_base = OTHER; note = 2'-O-methylcytidine-3'-phosphate
  modified_base 12: mod_base = OTHER; note = 2'-O-methyluridine-3'-phosphate
  modified_base 13: mod_base = OTHER; note = 2'-O-methylcytidine-3'-phosphate
  modified_base 14: mod_base = OTHER; note = 2'-fluoroadenosine-3'-phosphate
  modified_base 15: mod_base = OTHER; note = 2'-O-methylguanosine-3'-phosphate
  modified_base 16: mod_base = OTHER; note = 2'-fluoroadenosine-3'-phosphate
  modified_base 17: mod_base = OTHER; note = 2'-O-methylcytidine-3'-phosphate
  modified_base 18: mod_base = OTHER; note = 2'-O-methyladenosine-3'-phosphate
  modified_base 19: mod_base = OTHER; note = 2'-O-methylcytidine-3'-phosphate
  modified_base 20: mod_base = OTHER; note = 2'-O-methyladenosine-3'-phosphate
  modified_base 21: mod_base = OTHER; note = 2'-O-methyladenosine-3'-phosphorothioate
  modified_base 22: mod_base = OTHER; note = 2'-O-methyladenosine-3'-phosphorothioate
  modified_base 23: mod_base = OTHER; note = 2'-O-methylcytidine-3'-phosphate
atttctcctcctcagacacaaac

SEQ ID NO: 1371 - RNA, 23 nt, synthetic construct
  misc_feature 1..23: note = Description of Artificial Sequence: Synthetic oligonucleotide
  source 1..23: mol_type = other RNA
  modified_base 1: mod_base = OTHER; note = 2'-O-methyladenosine-3'-phosphorothioate
  modified_base 2: mod_base = OTHER; note = 2'-fluorocytidine-3'-phosphorothioate
  modified_base 3: mod_base = OTHER; note = 2'-O-methyladenosine-3'-phosphate
  modified_base 4: mod_base = OTHER; note = 2'-O-methyluridine-3'-phosphate
  modified_base 5: mod_base = OTHER; note = 2'-O-methyluridine-3'-phosphate
  modified_base 6: mod_base = OTHER; note = 2'-fluorocytidine-3'-phosphate
  modified_base 7: mod_base = OTHER; note = 2'-O-methyluridine-3'-phosphate
  modified_base 8: mod_base = OTHER; note = 2'-fluorouridine-3'-phosphate
  modified_base 9: mod_base = OTHER; note = 2'-fluoroguanosine-3'-phosphate
  modified_base 10: mod_base = OTHER; note = 2'-O-methyladenosine-3'-phosphate
  modified_base 11: mod_base = OTHER; note = 2'-O-methyluridine-3'-phosphate
  modified_base 12: mod_base = OTHER; note = 2'-O-methylguanosine-3'-phosphate
  modified_base 13: mod_base = OTHER; note = 2'-O-methyluridine-3'-phosphate
  modified_base 14: mod_base = OTHER; note = 2'-fluoroadenosine-3'-phosphate
  modified_base 15: mod_base = OTHER; note = 2'-O-methylguanosine-3'-phosphate
  modified_base 16: mod_base = OTHER; note = 2'-fluoroadenosine-3'-phosphate
  modified_base 17: mod_base = OTHER; note = 2'-O-methylcytidine-3'-phosphate
  modified_base 18: mod_base = OTHER; note = 2'-O-methylcytidine-3'-phosphate
  modified_base 19: mod_base = OTHER; note = 2'-O-methyluridine-3'-phosphate
  modified_base 20: mod_base = OTHER; note = 2'-O-methylcytidine-3'-phosphate
  modified_base 21: mod_base = OTHER; note = 2'-O-methylcytidine-3'-phosphorothioate
  modified_base 22: mod_base = OTHER; note = 2'-O-methyluridine-3'-phosphorothioate
  modified_base 23: mod_base = OTHER; note = 2'-O-methyluridine-3'-phosphate
acattcttgatgtagacctcctt

SEQ ID NO: 1372 - RNA, 23 nt, synthetic construct
  misc_feature 1..23: note = Description of Artificial Sequence: Synthetic oligonucleotide
  source 1..23: mol_type = other RNA
  modified_base 1: mod_base = OTHER; note = 2'-O-methyladenosine-3'-phosphorothioate
  modified_base 2: mod_base = OTHER; note = 2'-fluoroguanosine-3'-phosphorothioate
  modified_base 3: mod_base = OTHER; note = 2'-O-methyladenosine-3'-phosphate
  modified_base 4: mod_base = OTHER; note = 2'-O-methylguanosine-3'-phosphate
  modified_base 5: mod_base = OTHER; note = 2'-O-methyladenosine-3'-phosphate
  modified_base 6: mod_base = OTHER; note = 2'-fluorouridine-3'-phosphate
  modified_base 7: mod_base = OTHER; note = 2'-O-methylguanosine-3'-phosphate
  modified_base 8: mod_base = OTHER; note = 2'-fluorouridine-3'-phosphate
  modified_base 9: mod_base = OTHER; note = 2'-fluorocytidine-3'-phosphate
  modified_base 10: mod_base = OTHER; note = 2'-O-methylcytidine-3'-phosphate
  modified_base 11: mod_base = OTHER; note = 2'-O-methyluridine-3'-phosphate
  modified_base 12: mod_base = OTHER; note = 2'-O-methyluridine-3'-phosphate
  modified_base 13: mod_base = OTHER; note = 2'-O-methylguanosine-3'-phosphate
  modified_base 14: mod_base = OTHER; note = 2'-fluoroadenosine-3'-phosphate
  modified_base 15: mod_base = OTHER; note = 2'-O-methylcytidine-3'-phosphate
  modified_base 16: mod_base = OTHER; note = 2'-fluorouridine-3'-phosphate
  modified_base 17: mod_base = OTHER; note = 2'-O-methyluridine-3'-phosphate
  modified_base 18: mod_base = OTHER; note = 2'-O-methyluridine-3'-phosphate
  modified_base 19: mod_base = OTHER; note = 2'-O-methylguanosine-3'-phosphate
  modified_base 20: mod_base = OTHER; note = 2'-O-methyluridine-3'-phosphate
  modified_base 21: mod_base = OTHER; note = 2'-O-methylcytidine-3'-phosphorothioate
  modified_base 22: mod_base = OTHER; note = 2'-O-methyladenosine-3'-phosphorothioate
  modified_base 23: mod_base = OTHER; note = 2'-O-methyluridine-3'-phosphate
agagatgtccttgactttgtcat

SEQ ID NO: 1373 - RNA, 23 nt, synthetic construct
  misc_feature 1..23: note = Description of Artificial Sequence: Synthetic oligonucleotide
  source 1..23: mol_type = other RNA
  modified_base 1: mod_base = OTHER; note = 2'-O-methyladenosine-3'-phosphorothioate
  modified_base 2: mod_base = OTHER; note = 2'-fluorocytidine-3'-phosphorothioate
  modified_base 3: mod_base = OTHER; note = 2'-O-methyluridine-3'-phosphate
  modified_base 4: mod_base = OTHER; note = 2'-O-methylcytidine-3'-phosphate
  modified_base 5: mod_base = OTHER; note = 2'-O-methylcytidine-3'-phosphate
  modified_base 6: mod_base = OTHER; note = 2'-fluoroadenosine-3'-phosphate
  modified_base 7: mod_base = OTHER; note = 2'-O-methylguanosine-3'-phosphate
  modified_base 8: mod_base = OTHER; note = 2'-fluorouridine-3'-phosphate
  modified_base 9: mod_base = OTHER; note = 2'-fluoroadenosine-3'-phosphate
  modified_base 10: mod_base = OTHER; note = 2'-O-methylcytidine-3'-phosphate
  modified_base 11: mod_base = OTHER; note = 2'-O-methyladenosine-3'-phosphate
  modified_base 12: mod_base = OTHER; note = 2'-O-methyladenosine-3'-phosphate
  modified_base 13: mod_base = OTHER; note = 2'-O-methyladenosine-3'-phosphate
  modified_base 14: mod_base = OTHER; note = 2'-fluoroguanosine-3'-phosphate
  modified_base 15: mod_base = OTHER; note = 2'-O-methylguanosine-3'-phosphate
  modified_base 16: mod_base = OTHER; note = 2'-fluoroadenosine-3'-phosphate
  modified_base 17: mod_base = OTHER; note = 2'-O-methyladenosine-3'-phosphate
  modified_base 18: mod_base = OTHER; note = 2'-O-methylcytidine-3'-phosphate
  modified_base 19: mod_base = OTHER; note = 2'-O-methylcytidine-3'-phosphate
  modified_base 20: mod_base = OTHER; note = 2'-O-methylguanosine-3'-phosphate
  modified_base 21: mod_base = OTHER; note = 2'-O-methyladenosine-3'-phosphorothioate
  modified_base 22: mod_base = OTHER; note = 2'-O-methylguanosine-3'-phosphorothioate
  modified_base 23: mod_base = OTHER; note = 2'-O-methylguanosine-3'-phosphate
actccagtacaaaggaaccgagg

SEQ ID NO: 1374 - RNA, 23 nt, synthetic construct
  misc_feature 1..23: note = Description of Artificial Sequence: Synthetic oligonucleotide
  source 1..23: mol_type = other RNA
  modified_base 1: mod_base = OTHER; note = 2'-O-methyladenosine-3'-phosphorothioate
  modified_base 2: mod_base = OTHER; note = 2'-fluoroguanosine-3'-phosphorothioate
  modified_base 3: mod_base = OTHER; note = 2'-O-methyluridine-3'-phosphate
  modified_base 4: mod_base = OTHER; note = 2'-O-methylcytidine-3'-phosphate
  modified_base 5: mod_base = OTHER; note = 2'-O-methyladenosine-3'-phosphate
  modified_base 6: mod_base = OTHER; note = 2'-fluoroguanosine-3'-phosphate
  modified_base 7: mod_base = OTHER; note = 2'-O-methylcytidine-3'-phosphate
  modified_base 8: mod_base = OTHER; note = 2'-fluoroadenosine-3'-phosphate
  modified_base 9: mod_base = OTHER; note = 2'-fluorouridine-3'-phosphate
  modified_base 10: mod_base = OTHER; note = 2'-O-methyladenosine-3'-phosphate
  modified_base 11: mod_base = OTHER; note = 2'-O-methylguanosine-3'-phosphate
  modified_base 12: mod_base = OTHER; note = 2'-O-methylguanosine-3'-phosphate
  modified_base 13: mod_base = OTHER; note = 2'-O-methylguanosine-3'-phosphate
  modified_base 14: mod_base = OTHER; note = 2'-fluoroadenosine-3'-phosphate
  modified_base 15: mod_base = OTHER; note = 2'-O-methylcytidine-3'-phosphate
  modified_base 16: mod_base = OTHER; note = 2'-fluorouridine-3'-phosphate
  modified_base 17: mod_base = OTHER; note = 2'-O-methylcytidine-3'-phosphate
  modified_base 18: mod_base = OTHER; note = 2'-O-methyladenosine-3'-phosphate
  modified_base 19: mod_base = OTHER; note = 2'-O-methylcytidine-3'-phosphate
  modified_base 20: mod_base = OTHER; note = 2'-O-methyluridine-3'-phosphate
  modified_base 21: mod_base = OTHER; note = 2'-O-methylcytidine-3'-phosphorothioate
  modified_base 22: mod_base = OTHER; note = 2'-O-methylcytidine-3'-phosphorothioate
  modified_base 23: mod_base = OTHER; note = 2'-O-methyluridine-3'-phosphate
agtcagcatagggactcactcct

SEQ ID NO: 1375 - RNA, 23 nt, synthetic construct
  misc_feature 1..23: note = Description of Artificial Sequence: Synthetic oligonucleotide
  source 1..23: mol_type = other RNA
  modified_base 1: mod_base = OTHER; note = 2'-O-methyladenosine-3'-phosphorothioate
  modified_base 2: mod_base = OTHER; note = 2'-fluorocytidine-3'-phosphorothioate
  modified_base 3: mod_base = OTHER; note = 2'-O-methyladenosine-3'-phosphate
  modified_base 4: mod_base = OTHER; note = 2'-O-methylguanosine-3'-phosphate
  modified_base 5: mod_base = OTHER; note = 2'-O-methyladenosine-3'-phosphate
  modified_base 6: mod_base = OTHER; note = 2'-fluoroadenosine-3'-phosphate
  modified_base 7: mod_base = OTHER; note = 2'-O-methyluridine-3'-phosphate
  modified_base 8: mod_base = OTHER; note = 2'-fluorocytidine-3'-phosphate
  modified_base 9: mod_base = OTHER; note = 2'-fluoroadenosine-3'-phosphate
  modified_base 10: mod_base = OTHER; note = 2'-O-methylcytidine-3'-phosphate
  modified_base 11: mod_base = OTHER; note = 2'-O-methylcytidine-3'-phosphate
  modified_base 12: mod_base = OTHER; note = 2'-O-methyluridine-3'-phosphate
  modified_base 13: mod_base = OTHER; note = 2'-O-methylcytidine-3'-phosphate
  modified_base 14: mod_base = OTHER; note = 2'-fluorouridine-3'-phosphate
  modified_base 15: mod_base = OTHER; note = 2'-O-methylguanosine-3'-phosphate
  modified_base 16: mod_base = OTHER; note = 2'-fluorocytidine-3'-phosphate
  modified_base 17: mod_base = OTHER; note = 2'-O-methyladenosine-3'-phosphate
  modified_base 18: mod_base = OTHER; note = 2'-O-methyladenosine-3'-phosphate
  modified_base 19: mod_base = OTHER; note = 2'-O-methylguanosine-3'-phosphate
  modified_base 20: mod_base = OTHER; note = 2'-O-methyluridine-3'-phosphate
  modified_base 21: mod_base = OTHER; note = 2'-O-methyladenosine-3'-phosphorothioate
  modified_base 22: mod_base = OTHER; note = 2'-O-methyluridine-3'-phosphorothioate
  modified_base 23: mod_base = OTHER; note = 2'-O-methyluridine-3'-phosphate
acagaatcacctctgcaagtatt

SEQ ID NO: 1376 - RNA, 23 nt, synthetic construct
  misc_feature 1..23: note = Description of Artificial Sequence: Synthetic oligonucleotide
  source 1..23: mol_type = other RNA
  modified_base 1: mod_base = OTHER; note = 2'-O-methyladenosine-3'-phosphorothioate
  modified_base 2: mod_base = OTHER; note = 2'-fluoroadenosine-3'-phosphorothioate
  modified_base 3: mod_base = OTHER; note = 2'-O-methyladenosine-3'-phosphate
  modified_base 4: mod_base = OTHER; note = 2'-O-methylcytidine-3'-phosphate
  modified_base 5: mod_base = OTHER; note = 2'-O-methylguanosine-3'-phosphate
  modified_base 6: mod_base = OTHER; note = 2'-fluoroadenosine-3'-phosphate
  modified_base 7: mod_base = OTHER; note = 2'-O-methylcytidine-3'-phosphate
  modified_base 8: mod_base = OTHER; note = 2'-fluorouridine-3'-phosphate
  modified_base 9: mod_base = OTHER; note = 2'-fluorouridine-3'-phosphate
  modified_base 10: mod_base = OTHER; note = 2'-O-methylcytidine-3'-phosphate
  modified_base 11: mod_base = OTHER; note = 2'-O-methyluridine-3'-phosphate
  modified_base 12: mod_base = OTHER; note = 2'-O-methylcytidine-3'-phosphate
  modified_base 13: mod_base = OTHER; note = 2'-O-methyluridine-3'-phosphate
  modified_base 14: mod_base = OTHER; note = 2'-fluorouridine-3'-phosphate
  modified_base 15: mod_base = OTHER; note = 2'-O-methylguanosine-3'-phosphate
  modified_base 16: mod_base = OTHER; note = 2'-fluorouridine-3'-phosphate
  modified_base 17: mod_base = OTHER; note = 2'-O-methylguanosine-3'-phosphate
  modified_base 18: mod_base = OTHER; note = 2'-O-methyladenosine-3'-phosphate
  modified_base 19: mod_base = OTHER; note = 2'-O-methyladenosine-3'-phosphate
  modified_base 20: mod_base = OTHER; note = 2'-O-methylcytidine-3'-phosphate
  modified_base 21: mod_base = OTHER; note = 2'-O-methyluridine-3'-phosphorothioate
  modified_base 22: mod_base = OTHER; note = 2'-O-methyladenosine-3'-phosphorothioate
  modified_base 23: mod_base = OTHER; note = 2'-O-methyluridine-3'-phosphate
aaacgacttctcttgtgaactat

SEQ ID NO: 1377 - RNA, 23 nt, synthetic construct
  misc_feature 1..23: note = Description of Artificial Sequence: Synthetic oligonucleotide
  source 1..23: mol_type = other RNA
  modified_base 1: mod_base = OTHER; note = 2'-O-methyladenosine-3'-phosphorothioate
  modified_base 2: mod_base = OTHER; note = 2'-fluoroguanosine-3'-phosphorothioate
  modified_base 3: mod_base = OTHER; note = 2'-O-methyladenosine-3'-phosphate
  modified_base 4: mod_base = OTHER; note = 2'-O-methyluridine-3'-phosphate
  modified_base 5: mod_base = OTHER; note = 2'-O-methyluridine-3'-phosphate
  modified_base 6: mod_base = OTHER; note = 2'-fluoroadenosine-3'-phosphate
  modified_base 7: mod_base = OTHER; note = 2'-O-methylcytidine-3'-phosphate
  modified_base 8: mod_base = OTHER; note = 2'-fluoroadenosine-3'-phosphate
  modified_base 9: mod_base = OTHER; note = 2'-fluorocytidine-3'-phosphate
  modified_base 10: mod_base = OTHER; note = 2'-O-methylcytidine-3'-phosphate
  modified_base 11: mod_base = OTHER; note = 2'-O-methyladenosine-3'-phosphate
  modified_base 12: mod_base = OTHER; note = 2'-O-methyladenosine-3'-phosphate
  modified_base 13: mod_base = OTHER; note = 2'-O-methylcytidine-3'-phosphate
  modified_base 14: mod_base = OTHER; note = 2'-fluorouridine-3'-phosphate
  modified_base 15: mod_base = OTHER; note = 2'-O-methyluridine-3'-phosphate
  modified_base 16: mod_base = OTHER; note = 2'-fluoroguanosine-3'-phosphate
  modified_base 17: mod_base = OTHER; note = 2'-O-methyladenosine-3'-phosphate
  modified_base 18: mod_base = OTHER; note = 2'-O-methyladenosine-3'-phosphate
  modified_base 19: mod_base = OTHER; note = 2'-O-methyluridine-3'-phosphate
  modified_base 20: mod_base = OTHER; note = 2'-O-methylguanosine-3'-phosphate
  modified_base 21: mod_base = OTHER; note = 2'-O-methyladenosine-3'-phosphorothioate
  modified_base 22: mod_base = OTHER; note = 2'-O-methyladenosine-3'-phosphorothioate
  modified_base 23: mod_base = OTHER; note = 2'-O-methyladenosine-3'-phosphate
agattacaccaacttgaatgaaa

SEQ ID NO: 1378 - RNA, 23 nt, synthetic construct
  misc_feature 1..23: note = Description of Artificial Sequence: Synthetic oligonucleotide
  source 1..23: mol_type = other RNA
  modified_base 1: mod_base = OTHER; note = 2'-O-methyladenosine-3'-phosphorothioate
  modified_base 2: mod_base = OTHER; note = 2'-fluorouridine -3'-phosphorothioate
  modified_base 3: mod_base = OTHER; note = 2'-O-methyluridine-3'-phosphate
  modified_base 4: mod_base = OTHER; note = 2'-O-methyluridine-3'-phosphate
  modified_base 5: mod_base = OTHER; note = 2'-O-methylguanosine-3'-phosphate
  modified_base 6: mod_base = OTHER; note = 2'-fluorocytidine-3'-phosphate
  modified_base 7: mod_base = OTHER; note = 2'-O-methyladenosine-3'-phosphate
  modified_base 8: mod_base = OTHER; note = 2'-fluoroguanosine-3'-phosphate
  modified_base 9: mod_base = OTHER; note = 2'-fluoroadenosine-3'-phosphate
  modified_base 10: mod_base = OTHER; note = 2'-O-methylcytidine-3'-phosphate
  modified_base 11: mod_base = OTHER; note = 2'-O-methyladenosine-3'-phosphate
  modified_base 12: mod_base = OTHER; note = 2'-O-methyluridine-3'-phosphate
  modified_base 13: mod_base = OTHER; note = 2'-O-methylcytidine-3'-phosphate
  modified_base 14: mod_base = OTHER; note = 2'-fluorocytidine-3'-phosphate
  modified_base 15: mod_base = OTHER; note = 2'-O-methyladenosine-3'-phosphate
  modified_base 16: mod_base = OTHER; note = 2'-fluorocytidine-3'-phosphate
  modified_base 17: mod_base = OTHER; note = 2'-O-methyluridine-3'-phosphate
  modified_base 18: mod_base = OTHER; note = 2'-O-methyladenosine-3'-phosphate
  modified_base 19: mod_base = OTHER; note = 2'-O-methylcytidine-3'-phosphate
  modified_base 20: mod_base = OTHER; note = 2'-O-methyluridine-3'-phosphate
  modified_base 21: mod_base = OTHER; note = 2'-O-methylcytidine-3'-phosphorothioate
  modified_base 22: mod_base = OTHER; note = 2'-O-methylcytidine-3'-phosphorothioate
  modified_base 23: mod_base = OTHER; note = 2'-O-methylcytidine-3'-phosphate
atttgcagacatccactactccc

SEQ ID NO: 1379 - RNA, 23 nt, synthetic construct
  misc_feature 1..23: note = Description of Artificial Sequence: Synthetic oligonucleotide
  source 1..23: mol_type = other RNA
  modified_base 1: mod_base = OTHER; note = 2'-O-methyladenosine-3'-phosphorothioate
  modified_base 2: mod_base = OTHER; note = 2'-fluorouridine -3'-phosphorothioate
  modified_base 3: mod_base = OTHER; note = 2'-O-methylguanosine-3'-phosphate
  modified_base 4: mod_base = OTHER; note = 2'-O-methylcytidine-3'-phosphate
  modified_base 5: mod_base = OTHER; note = 2'-O-methyluridine-3'-phosphate
  modified_base 6: mod_base = OTHER; note = 2'-fluorouridine-3'-phosphate
  modified_base 7: mod_base = OTHER; note = 2'-O-methyluridine-3'-phosphate
  modified_base 8: mod_base = OTHER; note = 2'-fluorouridine-3'-phosphate
  modified_base 9: mod_base = OTHER; note = 2'-fluoroguanosine-3'-phosphate
  modified_base 10: mod_base = OTHER; note = 2'-O-methylcytidine-3'-phosphate
  modified_base 11: mod_base = OTHER; note = 2'-O-methylcytidine-3'-phosphate
  modified_base 12: mod_base = OTHER; note = 2'-O-methylguanosine-3'-phosphate
  modified_base 13: mod_base = OTHER; note = 2'-O-methylcytidine-3'-phosphate
  modified_base 14: mod_base = OTHER; note = 2'-fluorouridine-3'-phosphate
  modified_base 15: mod_base = OTHER; note = 2'-O-methyluridine-3'-phosphate
  modified_base 16: mod_base = OTHER; note = 2'-fluorocytidine-3'-phosphate
  modified_base 17: mod_base = OTHER; note = 2'-O-methyluridine-3'-phosphate
  modified_base 18: mod_base = OTHER; note = 2'-O-methylguanosine-3'-phosphate
  modified_base 19: mod_base = OTHER; note = 2'-O-methylguanosine-3'-phosphate
  modified_base 20: mod_base = OTHER; note = 2'-O-methyluridine-3'-phosphate
  modified_base 21: mod_base = OTHER; note = 2'-O-methyluridine-3'-phosphorothioate
  modified_base 22: mod_base = OTHER; note = 2'-O-methyluridine-3'-phosphorothioate
  modified_base 23: mod_base = OTHER; note = 2'-O-methyluridine-3'-phosphate
atgcttttgccgcttctggtttt

SEQ ID NO: 1380 - RNA, 23 nt, synthetic construct
  misc_feature 1..23: note = Description of Artificial Sequence: Synthetic oligonucleotide
  source 1..23: mol_type = other RNA
  modified_base 1: mod_base = OTHER; note = 2'-O-methyladenosine-3'-phosphorothioate
  modified_base 2: mod_base = OTHER; note = 2'-fluoroadenosine-3'-phosphorothioate
  modified_base 3: mod_base = OTHER; note = 2'-O-methyladenosine-3'-phosphate
  modified_base 4: mod_base = OTHER; note = 2'-O-methylguanosine-3'-phosphate
  modified_base 5: mod_base = OTHER; note = 2'-O-methyladenosine-3'-phosphate
  modified_base 6: mod_base = OTHER; note = 2'-fluoroguanosine-3'-phosphate
  modified_base 7: mod_base = OTHER; note = 2'-O-methylguanosine-3'-phosphate
  modified_base 8: mod_base = OTHER; note = 2'-fluorouridine-3'-phosphate
  modified_base 9: mod_base = OTHER; note = 2'-fluorouridine-3'-phosphate
  modified_base 10: mod_base = OTHER; note = 2'-O-methylguanosine-3'-phosphate
  modified_base 11: mod_base = OTHER; note = 2'-O-methyladenosine-3'-phosphate
  modified_base 12: mod_base = OTHER; note = 2'-O-methyluridine-3'-phosphate
  modified_base 13: mod_base = OTHER; note = 2'-O-methylguanosine-3'-phosphate
  modified_base 14: mod_base = OTHER; note = 2'-fluorouridine-3'-phosphate
  modified_base 15: mod_base = OTHER; note = 2'-O-methylguanosine-3'-phosphate
  modified_base 16: mod_base = OTHER; note = 2'-fluoroadenosine-3'-phosphate
  modified_base 17: mod_base = OTHER; note = 2'-O-methyladenosine-3'-phosphate
  modified_base 18: mod_base = OTHER; note = 2'-O-methyladenosine-3'-phosphate
  modified_base 19: mod_base = OTHER; note = 2'-O-methylguanosine-3'-phosphate
  modified_base 20: mod_base = OTHER; note = 2'-O-methyluridine-3'-phosphate
  modified_base 21: mod_base = OTHER; note = 2'-O-methylcytidine-3'-phosphorothioate
  modified_base 22: mod_base = OTHER; note = 2'-O-methyluridine-3'-phosphorothioate
  modified_base 23: mod_base = OTHER; note = 2'-O-methylcytidine-3'-phosphate
aaagaggttgatgtgaaagtctc

SEQ ID NO: 1381 - RNA, 23 nt, synthetic construct
  misc_feature 1..23: note = Description of Artificial Sequence: Synthetic oligonucleotide
  source 1..23: mol_type = other RNA
  modified_base 1: mod_base = OTHER; note = 2'-O-methyladenosine-3'-phosphorothioate
  modified_base 2: mod_base = OTHER; note = 2'-fluorocytidine-3'-phosphorothioate
  modified_base 3: mod_base = OTHER; note = 2'-O-methyladenosine-3'-phosphate
  modified_base 4: mod_base = OTHER; note = 2'-O-methylguanosine-3'-phosphate
  modified_base 5: mod_base = OTHER; note = 2'-O-methylguanosine-3'-phosphate
  modified_base 6: mod_base = OTHER; note = 2'-fluoroguanosine-3'-phosphate
  modified_base 7: mod_base = OTHER; note = 2'-O-methylcytidine-3'-phosphate
  modified_base 8: mod_base = OTHER; note = 2'-fluoroadenosine-3'-phosphate
  modified_base 9: mod_base = OTHER; note = 2'-fluoroguanosine-3'-phosphate
  modified_base 10: mod_base = OTHER; note = 2'-O-methylcytidine-3'-phosphate
  modified_base 11: mod_base = OTHER; note = 2'-O-methyladenosine-3'-phosphate
  modified_base 12: mod_base = OTHER; note = 2'-O-methylcytidine-3'-phosphate
  modified_base 13: mod_base = OTHER; note = 2'-O-methyluridine-3'-phosphate
  modified_base 14: mod_base = OTHER; note = 2'-fluorouridine-3'-phosphate
  modified_base 15: mod_base = OTHER; note = 2'-O-methylguanosine-3'-phosphate
  modified_base 16: mod_base = OTHER; note = 2'-fluoroadenosine-3'-phosphate
  modified_base 17: mod_base = OTHER; note = 2'-O-methyladenosine-3'-phosphate
  modified_base 18: mod_base = OTHER; note = 2'-O-methyladenosine-3'-phosphate
  modified_base 19: mod_base = OTHER; note = 2'-O-methylguanosine-3'-phosphate
  modified_base 20: mod_base = OTHER; note = 2'-O-methyladenosine-3'-phosphate
  modified_base 21: mod_base = OTHER; note = 2'-O-methylguanosine-3'-phosphorothioate
  modified_base 22: mod_base = OTHER; note = 2'-O-methylguanosine-3'-phosphorothioate
  modified_base 23: mod_base = OTHER; note = 2'-O-methyluridine-3'-phosphate
acagggcagcacttgaaagaggt

SEQ ID NO: 1382 - RNA, 23 nt, synthetic construct
  misc_feature 1..23: note = Description of Artificial Sequence: Synthetic oligonucleotide
  source 1..23: mol_type = other RNA
  modified_base 1: mod_base = OTHER; note = 2'-O-methyladenosine-3'-phosphorothioate
  modified_base 2: mod_base = OTHER; note = 2'-fluorouridine -3'-phosphorothioate
  modified_base 3: mod_base = OTHER; note = 2'-O-methylcytidine-3'-phosphate
  modified_base 4: mod_base = OTHER; note = 2'-O-methyladenosine-3'-phosphate
  modified_base 5: mod_base = OTHER; note = 2'-O-methyluridine-3'-phosphate
  modified_base 6: mod_base = OTHER; note = 2'-fluorocytidine-3'-phosphate
  modified_base 7: mod_base = OTHER; note = 2'-O-methyluridine-3'-phosphate
  modified_base 8: mod_base = OTHER; note = 2'-fluorouridine-3'-phosphate
  modified_base 9: mod_base = OTHER; note = 2'-fluoroguanosine-3'-phosphate
  modified_base 10: mod_base = OTHER; note = 2'-O-methylguanosine-3'-phosphate
  modified_base 11: mod_base = OTHER; note = 2'-O-methyladenosine-3'-phosphate
  modified_base 12: mod_base = OTHER; note = 2'-O-methylguanosine-3'-phosphate
  modified_base 13: mod_base = OTHER; note = 2'-O-methyluridine-3'-phosphate
  modified_base 14: mod_base = OTHER; note = 2'-fluorouridine-3'-phosphate
  modified_base 15: mod_base = OTHER; note = 2'-O-methyluridine-3'-phosphate
  modified_base 16: mod_base = OTHER; note = 2'-fluorocytidine-3'-phosphate
  modified_base 17: mod_base = OTHER; note = 2'-O-methyluridine-3'-phosphate
  modified_base 18: mod_base = OTHER; note = 2'-O-methylcytidine-3'-phosphate
  modified_base 19: mod_base = OTHER; note = 2'-O-methylcytidine-3'-phosphate
  modified_base 20: mod_base = OTHER; note = 2'-O-methyluridine-3'-phosphate
  modified_base 21: mod_base = OTHER; note = 2'-O-methyluridine-3'-phosphorothioate
  modified_base 22: mod_base = OTHER; note = 2'-O-methylcytidine-3'-phosphorothioate
  modified_base 23: mod_base = OTHER; note = 2'-O-methyladenosine-3'-phosphate
atcatcttggagtttctccttca

SEQ ID NO: 1383 - RNA, 23 nt, synthetic construct
  misc_feature 1..23: note = Description of Artificial Sequence: Synthetic oligonucleotide
  source 1..23: mol_type = other RNA
  modified_base 1: mod_base = OTHER; note = 2'-O-methyladenosine-3'-phosphorothioate
  modified_base 2: mod_base = OTHER; note = 2'-fluorouridine -3'-phosphorothioate
  modified_base 3: mod_base = OTHER; note = 2'-O-methyladenosine-3'-phosphate
  modified_base 4: mod_base = OTHER; note = 2'-O-methyluridine-3'-phosphate
  modified_base 5: mod_base = OTHER; note = 2'-O-methyladenosine-3'-phosphate
  modified_base 6: mod_base = OTHER; note = 2'-fluoroguanosine-3'-phosphate
  modified_base 7: mod_base = OTHER; note = 2'-O-methyladenosine-3'-phosphate
  modified_base 8: mod_base = OTHER; note = 2'-fluoroadenosine-3'-phosphate
  modified_base 9: mod_base = OTHER; note = 2'-fluoroadenosine-3'-phosphate
  modified_base 10: mod_base = OTHER; note = 2'-O-methyladenosine-3'-phosphate
  modified_base 11: mod_base = OTHER; note = 2'-O-methylcytidine-3'-phosphate
  modified_base 12: mod_base = OTHER; note = 2'-O-methylcytidine-3'-phosphate
  modified_base 13: mod_base = OTHER; note = 2'-O-methylcytidine-3'-phosphate
  modified_base 14: mod_base = OTHER; note = 2'-fluoroadenosine-3'-phosphate
  modified_base 15: mod_base = OTHER; note = 2'-O-methyladenosine-3'-phosphate
  modified_base 16: mod_base = OTHER; note = 2'-fluoroadenosine-3'-phosphate
  modified_base 17: mod_base = OTHER; note = 2'-O-methyluridine-3'-phosphate
  modified_base 18: mod_base = OTHER; note = 2'-O-methylcytidine-3'-phosphate
  modified_base 19: mod_base = OTHER; note = 2'-O-methylcytidine-3'-phosphate
  modified_base 20: mod_base = OTHER; note = 2'-O-methyluridine-3'-phosphate
  modified_base 21: mod_base = OTHER; note = 2'-O-methylcytidine-3'-phosphorothioate
  modified_base 22: mod_base = OTHER; note = 2'-O-methyladenosine-3'-phosphorothioate
  modified_base 23: mod_base = OTHER; note = 2'-O-methyluridine-3'-phosphate
atatagaaaacccaaatcctcat

SEQ ID NO: 1384 - RNA, 23 nt, synthetic construct
  misc_feature 1..23: note = Description of Artificial Sequence: Synthetic oligonucleotide
  source 1..23: mol_type = other RNA
  modified_base 1: mod_base = OTHER; note = 2'-O-methyladenosine-3'-phosphorothioate
  modified_base 2: mod_base = OTHER; note = 2'-fluoroguanosine-3'-phosphorothioate
  modified_base 3: mod_base = OTHER; note = 2'-O-methyladenosine-3'-phosphate
  modified_base 4: mod_base = OTHER; note = 2'-O-methyluridine-3'-phosphate
  modified_base 5: mod_base = OTHER; note = 2'-O-methylguanosine-3'-phosphate
  modified_base 6: mod_base = OTHER; note = 2'-fluoroguanosine-3'-phosphate
  modified_base 7: mod_base = OTHER; note = 2'-O-methyluridine-3'-phosphate
  modified_base 8: mod_base = OTHER; note = 2'-fluoroguanosine-3'-phosphate
  modified_base 9: mod_base = OTHER; note = 2'-fluorouridine-3'-phosphate
  modified_base 10: mod_base = OTHER; note = 2'-O-methylguanosine-3'-phosphate
  modified_base 11: mod_base = OTHER; note = 2'-O-methyluridine-3'-phosphate
  modified_base 12: mod_base = OTHER; note = 2'-O-methylcytidine-3'-phosphate
  modified_base 13: mod_base = OTHER; note = 2'-O-methylcytidine-3'-phosphate
  modified_base 14: mod_base = OTHER; note = 2'-fluorouridine-3'-phosphate
  modified_base 15: mod_base = OTHER; note = 2'-O-methylguanosine-3'-phosphate
  modified_base 16: mod_base = OTHER; note = 2'-fluoroguanosine-3'-phosphate
  modified_base 17: mod_base = OTHER; note = 2'-O-methylcytidine-3'-phosphate
  modified_base 18: mod_base = OTHER; note = 2'-O-methyluridine-3'-phosphate
  modified_base 19: mod_base = OTHER; note = 2'-O-methyluridine-3'-phosphate
  modified_base 20: mod_base = OTHER; note = 2'-O-methylguanosine-3'-phosphate
  modified_base 21: mod_base = OTHER; note = 2'-O-methylcytidine-3'-phosphorothioate
  modified_base 22: mod_base = OTHER; note = 2'-O-methyluridine-3'-phosphorothioate
  modified_base 23: mod_base = OTHER; note = 2'-O-methyluridine-3'-phosphate
agatggtgtgtcctggcttgctt

SEQ ID NO: 1385 - RNA, 23 nt, synthetic construct
  misc_feature 1..23: note = Description of Artificial Sequence: Synthetic oligonucleotide
  source 1..23: mol_type = other RNA
  modified_base 1: mod_base = OTHER; note = 2'-O-methyladenosine-3'-phosphorothioate
  modified_base 2: mod_base = OTHER; note = 2'-fluoroguanosine-3'-phosphorothioate
  modified_base 3: mod_base = OTHER; note = 2'-O-methyluridine-3'-phosphate
  modified_base 4: mod_base = OTHER; note = 2'-O-methyluridine-3'-phosphate
  modified_base 5: mod_base = OTHER; note = 2'-O-methylguanosine-3'-phosphate
  modified_base 6: mod_base = OTHER; note = 2'-fluoroguanosine-3'-phosphate
  modified_base 7: mod_base = OTHER; note = 2'-O-methyladenosine-3'-phosphate
  modified_base 8: mod_base = OTHER; note = 2'-fluoroadenosine-3'-phosphate
  modified_base 9: mod_base = OTHER; note = 2'-fluoroguanosine-3'-phosphate
  modified_base 10: mod_base = OTHER; note = 2'-O-methylguanosine-3'-phosphate
  modified_base 11: mod_base = OTHER; note = 2'-O-methylcytidine-3'-phosphate
  modified_base 12: mod_base = OTHER; note = 2'-O-methyladenosine-3'-phosphate
  modified_base 13: mod_base = OTHER; note = 2'-O-methylguanosine-3'-phosphate
  modified_base 14: mod_base = OTHER; note = 2'-fluoroguanosine-3'-phosphate
  modified_base 15: mod_base = OTHER; note = 2'-O-methyladenosine-3'-phosphate
  modified_base 16: mod_base = OTHER; note = 2'-fluoroguanosine-3'-phosphate
  modified_base 17: mod_base = OTHER; note = 2'-O-methyladenosine-3'-phosphate
  modified_base 18: mod_base = OTHER; note = 2'-O-methylguanosine-3'-phosphate
  modified_base 19: mod_base = OTHER; note = 2'-O-methyladenosine-3'-phosphate
  modified_base 20: mod_base = OTHER; note = 2'-O-methyladenosine-3'-phosphate
  modified_base 21: mod_base = OTHER; note = 2'-O-methylguanosine-3'-phosphorothioate
  modified_base 22: mod_base = OTHER; note = 2'-O-methylcytidine-3'-phosphorothioate
  modified_base 23: mod_base = OTHER; note = 2'-O-methyluridine-3'-phosphate
agttggaaggcaggagagaagct

SEQ ID NO: 1386 - RNA, 23 nt, synthetic construct
  misc_feature 1..23: note = Description of Artificial Sequence: Synthetic oligonucleotide
  source 1..23: mol_type = other RNA
  modified_base 1: mod_base = OTHER; note = 2'-O-methyladenosine-3'-phosphorothioate
  modified_base 2: mod_base = OTHER; note = 2'-fluorocytidine-3'-phosphorothioate
  modified_base 3: mod_base = OTHER; note = 2'-O-methyluridine-3'-phosphate
  modified_base 4: mod_base = OTHER; note = 2'-O-methylcytidine-3'-phosphate
  modified_base 5: mod_base = OTHER; note = 2'-O-methylcytidine-3'-phosphate
  modified_base 6: mod_base = OTHER; note = 2'-fluoroadenosine-3'-phosphate
  modified_base 7: mod_base = OTHER; note = 2'-O-methylguanosine-3'-phosphate
  modified_base 8: mod_base = OTHER; note = 2'-fluoroadenosine-3'-phosphate
  modified_base 9: mod_base = OTHER; note = 2'-fluorocytidine-3'-phosphate
  modified_base 10: mod_base = OTHER; note = 2'-O-methyladenosine-3'-phosphate
  modified_base 11: mod_base = OTHER; note = 2'-O-methyladenosine-3'-phosphate
  modified_base 12: mod_base = OTHER; note = 2'-O-methylguanosine-3'-phosphate
  modified_base 13: mod_base = OTHER; note = 2'-O-methyladenosine-3'-phosphate
  modified_base 14: mod_base = OTHER; note = 2'-fluoroguanosine-3'-phosphate
  modified_base 15: mod_base = OTHER; note = 2'-O-methylguanosine-3'-phosphate
  modified_base 16: mod_base = OTHER; note = 2'-fluorocytidine-3'-phosphate
  modified_base 17: mod_base = OTHER; note = 2'-O-methylcytidine-3'-phosphate
  modified_base 18: mod_base = OTHER; note = 2'-O-methylcytidine-3'-phosphate
  modified_base 19: mod_base = OTHER; note = 2'-O-methyladenosine-3'-phosphate
  modified_base 20: mod_base = OTHER; note = 2'-O-methyladenosine-3'-phosphate
  modified_base 21: mod_base = OTHER; note = 2'-O-methylguanosine-3'-phosphorothioate
  modified_base 22: mod_base = OTHER; note = 2'-O-methyladenosine-3'-phosphorothioate
  modified_base 23: mod_base = OTHER; note = 2'-O-methyluridine-3'-phosphate
actccagacaagaggcccaagat

SEQ ID NO: 1387 - RNA, 23 nt, synthetic construct
  misc_feature 1..23: note = Description of Artificial Sequence: Synthetic oligonucleotide
  source 1..23: mol_type = other RNA
  modified_base 1: mod_base = OTHER; note = 2'-O-methyladenosine-3'-phosphorothioate
  modified_base 2: mod_base = OTHER; note = 2'-fluoroadenosine-3'-phosphorothioate
  modified_base 3: mod_base = OTHER; note = 2'-O-methylguanosine-3'-phosphate
  modified_base 4: mod_base = OTHER; note = 2'-O-methylguanosine-3'-phosphate
  modified_base 5: mod_base = OTHER; note = 2'-O-methyladenosine-3'-phosphate
  modified_base 6: mod_base = OTHER; note = 2'-fluoroguanosine-3'-phosphate
  modified_base 7: mod_base = OTHER; note = 2'-O-methylcytidine-3'-phosphate
  modified_base 8: mod_base = OTHER; note = 2'-fluorocytidine-3'-phosphate
  modified_base 9: mod_base = OTHER; note = 2'-fluoroguanosine-3'-phosphate
  modified_base 10: mod_base = OTHER; note = 2'-O-methylcytidine-3'-phosphate
  modified_base 11: mod_base = OTHER; note = 2'-O-methylcytidine-3'-phosphate
  modified_base 12: mod_base = OTHER; note = 2'-O-methyluridine-3'-phosphate
  modified_base 13: mod_base = OTHER; note = 2'-O-methyluridine-3'-phosphate
  modified_base 14: mod_base = OTHER; note = 2'-fluorouridine-3'-phosphate
  modified_base 15: mod_base = OTHER; note = 2'-O-methylguanosine-3'-phosphate
  modified_base 16: mod_base = OTHER; note = 2'-fluoroadenosine-3'-phosphate
  modified_base 17: mod_base = OTHER; note = 2'-O-methyluridine-3'-phosphate
  modified_base 18: mod_base = OTHER; note = 2'-O-methylcytidine-3'-phosphate
  modified_base 19: mod_base = OTHER; note = 2'-O-methyluridine-3'-phosphate
  modified_base 20: mod_base = OTHER; note = 2'-O-methylcytidine-3'-phosphate
  modified_base 21: mod_base = OTHER; note = 2'-O-methyluridine-3'-phosphorothioate
  modified_base 22: mod_base = OTHER; note = 2'-O-methyladenosine-3'-phosphorothioate
  modified_base 23: mod_base = OTHER; note = 2'-O-methylcytidine-3'-phosphate
aaggagccgcctttgatctctac

SEQ ID NO: 1388 - RNA, 23 nt, synthetic construct
  misc_feature 1..23: note = Description of Artificial Sequence: Synthetic oligonucleotide
  source 1..23: mol_type = other RNA
  modified_base 1: mod_base = OTHER; note = 2'-O-methyladenosine-3'-phosphorothioate
  modified_base 2: mod_base = OTHER; note = 2'-fluoroadenosine-3'-phosphorothioate
  modified_base 3: mod_base = OTHER; note = 2'-O-methyladenosine-3'-phosphate
  modified_base 4: mod_base = OTHER; note = 2'-O-methylguanosine-3'-phosphate
  modified_base 5: mod_base = OTHER; note = 2'-O-methylguanosine-3'-phosphate
  modified_base 6: mod_base = OTHER; note = 2'-fluoroadenosine-3'-phosphate
  modified_base 7: mod_base = OTHER; note = 2'-O-methylcytidine-3'-phosphate
  modified_base 8: mod_base = OTHER; note = 2'-fluoroadenosine-3'-phosphate
  modified_base 9: mod_base = OTHER; note = 2'-fluorocytidine-3'-phosphate
  modified_base 10: mod_base = OTHER; note = 2'-O-methyladenosine-3'-phosphate
  modified_base 11: mod_base = OTHER; note = 2'-O-methylcytidine-3'-phosphate
  modified_base 12: mod_base = OTHER; note = 2'-O-methylguanosine-3'-phosphate
  modified_base 13: mod_base = OTHER; note = 2'-O-methyluridine-3'-phosphate
  modified_base 14: mod_base = OTHER; note = 2'-fluoroadenosine-3'-phosphate
  modified_base 15: mod_base = OTHER; note = 2'-O-methylcytidine-3'-phosphate
  modified_base 16: mod_base = OTHER; note = 2'-fluorouridine-3'-phosphate
  modified_base 17: mod_base = OTHER; note = 2'-O-methylcytidine-3'-phosphate
  modified_base 18: mod_base = OTHER; note = 2'-O-methylcytidine-3'-phosphate
  modified_base 19: mod_base = OTHER; note = 2'-O-methyladenosine-3'-phosphate
  modified_base 20: mod_base = OTHER; note = 2'-O-methylguanosine-3'-phosphate
  modified_base 21: mod_base = OTHER; note = 2'-O-methyluridine-3'-phosphorothioate
  modified_base 22: mod_base = OTHER; note = 2'-O-methylguanosine-3'-phosphorothioate
  modified_base 23: mod_base = OTHER; note = 2'-O-methylcytidine-3'-phosphate
aaaggacacacgtactccagtgc

SEQ ID NO: 1389 - RNA, 23 nt, synthetic construct
  misc_feature 1..23: note = Description of Artificial Sequence: Synthetic oligonucleotide
  source 1..23: mol_type = other RNA
  modified_base 1: mod_base = OTHER; note = 2'-O-methyladenosine-3'-phosphorothioate
  modified_base 2: mod_base = OTHER; note = 2'-fluorouridine -3'-phosphorothioate
  modified_base 3: mod_base = OTHER; note = 2'-O-methyluridine-3'-phosphate
  modified_base 4: mod_base = OTHER; note = 2'-O-methyluridine-3'-phosphate
  modified_base 5: mod_base = OTHER; note = 2'-O-methylguanosine-3'-phosphate
  modified_base 6: mod_base = OTHER; note = 2'-fluoroguanosine-3'-phosphate
  modified_base 7: mod_base = OTHER; note = 2'-O-methyluridine-3'-phosphate
  modified_base 8: mod_base = OTHER; note = 2'-fluorocytidine-3'-phosphate
  modified_base 9: mod_base = OTHER; note = 2'-fluorouridine-3'-phosphate
  modified_base 10: mod_base = OTHER; note = 2'-O-methyluridine-3'-phosphate
  modified_base 11: mod_base = OTHER; note = 2'-O-methylguanosine-3'-phosphate
  modified_base 12: mod_base = OTHER; note = 2'-O-methyladenosine-3'-phosphate
  modified_base 13: mod_base = OTHER; note = 2'-O-methylguanosine-3'-phosphate
  modified_base 14: mod_base = OTHER; note = 2'-fluorouridine-3'-phosphate
  modified_base 15: mod_base = OTHER; note = 2'-O-methylcytidine-3'-phosphate
  modified_base 16: mod_base = OTHER; note = 2'-fluorouridine-3'-phosphate
  modified_base 17: mod_base = OTHER; note = 2'-O-methyluridine-3'-phosphate
  modified_base 18: mod_base = OTHER; note = 2'-O-methylcytidine-3'-phosphate
  modified_base 19: mod_base = OTHER; note = 2'-O-methyladenosine-3'-phosphate
  modified_base 20: mod_base = OTHER; note = 2'-O-methylguanosine-3'-phosphate
  modified_base 21: mod_base = OTHER; note = 2'-O-methylguanosine-3'-phosphorothioate
  modified_base 22: mod_base = OTHER; note = 2'-O-methylguanosine-3'-phosphorothioate
  modified_base 23: mod_base = OTHER; note = 2'-O-methyluridine-3'-phosphate
atttggtcttgagtcttcagggt

SEQ ID NO: 1390 - RNA, 23 nt, synthetic construct
  misc_feature 1..23: note = Description of Artificial Sequence: Synthetic oligonucleotide
  source 1..23: mol_type = other RNA
  modified_base 1: mod_base = OTHER; note = 2'-O-methyladenosine-3'-phosphorothioate
  modified_base 2: mod_base = OTHER; note = 2'-fluoroadenosine-3'-phosphorothioate
  modified_base 3: mod_base = OTHER; note = 2'-O-methylcytidine-3'-phosphate
  modified_base 4: mod_base = OTHER; note = 2'-O-methyluridine-3'-phosphate
  modified_base 5: mod_base = OTHER; note = 2'-O-methylcytidine-3'-phosphate
  modified_base 6: mod_base = OTHER; note = 2'-fluorouridine-3'-phosphate
  modified_base 7: mod_base = OTHER; note = 2'-O-methylguanosine-3'-phosphate
  modified_base 8: mod_base = OTHER; note = 2'-fluorocytidine-3'-phosphate
  modified_base 9: mod_base = OTHER; note = 2'-fluorocytidine-3'-phosphate
  modified_base 10: mod_base = OTHER; note = 2'-O-methyluridine-3'-phosphate
  modified_base 11: mod_base = OTHER; note = 2'-O-methyluridine-3'-phosphate
  modified_base 12: mod_base = OTHER; note = 2'-O-methylcytidine-3'-phosphate
  modified_base 13: mod_base = OTHER; note = 2'-O-methylcytidine-3'-phosphate
  modified_base 14: mod_base = OTHER; note = 2'-fluorouridine-3'-phosphate
  modified_base 15: mod_base = OTHER; note = 2'-O-methylguanosine-3'-phosphate
  modified_base 16: mod_base = OTHER; note = 2'-fluoroadenosine-3'-phosphate
  modified_base 17: mod_base = OTHER; note = 2'-O-methylcytidine-3'-phosphate
  modified_base 18: mod_base = OTHER; note = 2'-O-methyladenosine-3'-phosphate
  modified_base 19: mod_base = OTHER; note = 2'-O-methylguanosine-3'-phosphate
  modified_base 20: mod_base = OTHER; note = 2'-O-methyluridine-3'-phosphate
  modified_base 21: mod_base = OTHER; note = 2'-O-methylcytidine-3'-phosphorothioate
  modified_base 22: mod_base = OTHER; note = 2'-O-methyluridine-3'-phosphorothioate
  modified_base 23: mod_base = OTHER; note = 2'-O-methyluridine-3'-phosphate
aactctgccttcctgacagtctt

SEQ ID NO: 1391 - RNA, 23 nt, synthetic construct
  misc_feature 1..23: note = Description of Artificial Sequence: Synthetic oligonucleotide
  source 1..23: mol_type = other RNA
  modified_base 1: mod_base = OTHER; note = 2'-O-methyladenosine-3'-phosphorothioate
  modified_base 2: mod_base = OTHER; note = 2'-fluorouridine -3'-phosphorothioate
  modified_base 3: mod_base = OTHER; note = 2'-O-methylguanosine-3'-phosphate
  modified_base 4: mod_base = OTHER; note = 2'-O-methylcytidine-3'-phosphate
  modified_base 5: mod_base = OTHER; note = 2'-O-methylcytidine-3'-phosphate
  modified_base 6: mod_base = OTHER; note = 2'-fluorocytidine-3'-phosphate
  modified_base 7: mod_base = OTHER; note = 2'-O-methyladenosine-3'-phosphate
  modified_base 8: mod_base = OTHER; note = 2'-fluorocytidine-3'-phosphate
  modified_base 9: mod_base = OTHER; note = 2'-fluorocytidine-3'-phosphate
  modified_base 10: mod_base = OTHER; note = 2'-O-methyluridine-3'-phosphate
  modified_base 11: mod_base = OTHER; note = 2'-O-methyluridine-3'-phosphate
  modified_base 12: mod_base = OTHER; note = 2'-O-methylcytidine-3'-phosphate
  modified_base 13: mod_base = OTHER; note = 2'-O-methylcytidine-3'-phosphate
  modified_base 14: mod_base = OTHER; note = 2'-fluorouridine-3'-phosphate
  modified_base 15: mod_base = OTHER; note = 2'-O-methyluridine-3'-phosphate
  modified_base 16: mod_base = OTHER; note = 2'-fluoroguanosine-3'-phosphate
  modified_base 17: mod_base = OTHER; note = 2'-O-methyluridine-3'-phosphate
  modified_base 18: mod_base = OTHER; note = 2'-O-methylguanosine-3'-phosphate
  modified_base 19: mod_base = OTHER; note = 2'-O-methylcytidine-3'-phosphate
  modified_base 20: mod_base = OTHER; note = 2'-O-methylcytidine-3'-phosphate
  modified_base 21: mod_base = OTHER; note = 2'-O-methyladenosine-3'-phosphorothioate
  modified_base 22: mod_base = OTHER; note = 2'-O-methyladenosine-3'-phosphorothioate
  modified_base 23: mod_base = OTHER; note = 2'-O-methyluridine-3'-phosphate
atgcccaccttccttgtgccaat

SEQ ID NO: 1392 - RNA, 23 nt, synthetic construct
  misc_feature 1..23: note = Description of Artificial Sequence: Synthetic oligonucleotide
  source 1..23: mol_type = other RNA
  modified_base 1: mod_base = OTHER; note = 2'-O-methyladenosine-3'-phosphorothioate
  modified_base 2: mod_base = OTHER; note = 2'-fluorouridine -3'-phosphorothioate
  modified_base 3: mod_base = OTHER; note = 2'-O-methylguanosine-3'-phosphate
  modified_base 4: mod_base = OTHER; note = 2'-O-methyladenosine-3'-phosphate
  modified_base 5: mod_base = OTHER; note = 2'-O-methylcytidine-3'-phosphate
  modified_base 6: mod_base = OTHER; note = 2'-fluoroguanosine-3'-phosphate
  modified_base 7: mod_base = OTHER; note = 2'-O-methylcytidine-3'-phosphate
  modified_base 8: mod_base = OTHER; note = 2'-fluorouridine-3'-phosphate
  modified_base 9: mod_base = OTHER; note = 2'-fluoroguanosine-3'-phosphate
  modified_base 10: mod_base = OTHER; note = 2'-O-methyluridine-3'-phosphate
  modified_base 11: mod_base = OTHER; note = 2'-O-methylcytidine-3'-phosphate
  modified_base 12: mod_base = OTHER; note = 2'-O-methyluridine-3'-phosphate
  modified_base 13: mod_base = OTHER; note = 2'-O-methyluridine-3'-phosphate
  modified_base 14: mod_base = OTHER; note = 2'-fluorocytidine-3'-phosphate
  modified_base 15: mod_base = OTHER; note = 2'-O-methyladenosine-3'-phosphate
  modified_base 16: mod_base = OTHER; note = 2'-fluoroadenosine-3'-phosphate
  modified_base 17: mod_base = OTHER; note = 2'-O-methylguanosine-3'-phosphate
  modified_base 18: mod_base = OTHER; note = 2'-O-methylguanosine-3'-phosphate
  modified_base 19: mod_base = OTHER; note = 2'-O-methylcytidine-3'-phosphate
  modified_base 20: mod_base = OTHER; note = 2'-O-methylguanosine-3'-phosphate
  modified_base 21: mod_base = OTHER; note = 2'-O-methylguanosine-3'-phosphorothioate
  modified_base 22: mod_base = OTHER; note = 2'-O-methyluridine-3'-phosphorothioate
  modified_base 23: mod_base = OTHER; note = 2'-O-methyladenosine-3'-phosphate
atgacgctgtcttcaaggcggta

SEQ ID NO: 1393 - RNA, 23 nt, synthetic construct
  misc_feature 1..23: note = Description of Artificial Sequence: Synthetic oligonucleotide
  source 1..23: mol_type = other RNA
  modified_base 1: mod_base = OTHER; note = 2'-O-methyladenosine-3'-phosphorothioate
  modified_base 2: mod_base = OTHER; note = 2'-fluoroadenosine-3'-phosphorothioate
  modified_base 3: mod_base = OTHER; note = 2'-O-methyluridine-3'-phosphate
  modified_base 4: mod_base = OTHER; note = 2'-O-methyluridine-3'-phosphate
  modified_base 5: mod_base = OTHER; note = 2'-O-methyladenosine-3'-phosphate
  modified_base 6: mod_base = OTHER; note = 2'-fluorocytidine-3'-phosphate
  modified_base 7: mod_base = OTHER; note = 2'-O-methyluridine-3'-phosphate
  modified_base 8: mod_base = OTHER; note = 2'-fluoroguanosine-3'-phosphate
  modified_base 9: mod_base = OTHER; note = 2'-fluorocytidine-3'-phosphate
  modified_base 10: mod_base = OTHER; note = 2'-O-methyluridine-3'-phosphate
  modified_base 11: mod_base = OTHER; note = 2'-O-methylguanosine-3'-phosphate
  modified_base 12: mod_base = OTHER; note = 2'-O-methyluridine-3'-phosphate
  modified_base 13: mod_base = OTHER; note = 2'-O-methylcytidine-3'-phosphate
  modified_base 14: mod_base = OTHER; note = 2'-fluorouridine-3'-phosphate
  modified_base 15: mod_base = OTHER; note = 2'-O-methylguanosine-3'-phosphate
  modified_base 16: mod_base = OTHER; note = 2'-fluorocytidine-3'-phosphate
  modified_base 17: mod_base = OTHER; note = 2'-O-methyluridine-3'-phosphate
  modified_base 18: mod_base = OTHER; note = 2'-O-methyluridine-3'-phosphate
  modified_base 19: mod_base = OTHER; note = 2'-O-methylcytidine-3'-phosphate
  modified_base 20: mod_base = OTHER; note = 2'-O-methyladenosine-3'-phosphate
  modified_base 21: mod_base = OTHER; note = 2'-O-methylguanosine-3'-phosphorothioate
  modified_base 22: mod_base = OTHER; note = 2'-O-methyladenosine-3'-phosphorothioate
  modified_base 23: mod_base = OTHER; note = 2'-O-methylcytidine-3'-phosphate
aattactgctgtctgcttcagac

SEQ ID NO: 1394 - RNA, 23 nt, synthetic construct
  misc_feature 1..23: note = Description of Artificial Sequence: Synthetic oligonucleotide
  source 1..23: mol_type = other RNA
  modified_base 1: mod_base = OTHER; note = 2'-O-methyladenosine-3'-phosphorothioate
  modified_base 2: mod_base = OTHER; note = 2'-fluoroguanosine-3'-phosphorothioate
  modified_base 3: mod_base = OTHER; note = 2'-O-methylcytidine-3'-phosphate
  modified_base 4: mod_base = OTHER; note = 2'-O-methyluridine-3'-phosphate
  modified_base 5: mod_base = OTHER; note = 2'-O-methyluridine-3'-phosphate
  modified_base 6: mod_base = OTHER; note = 2'-fluorocytidine-3'-phosphate
  modified_base 7: mod_base = OTHER; note = 2'-O-methylguanosine-3'-phosphate
  modified_base 8: mod_base = OTHER; note = 2'-fluorouridine-3'-phosphate
  modified_base 9: mod_base = OTHER; note = 2'-fluoroguanosine-3'-phosphate
  modified_base 10: mod_base = OTHER; note = 2'-O-methyladenosine-3'-phosphate
  modified_base 11: mod_base = OTHER; note = 2'-O-methylcytidine-3'-phosphate
  modified_base 12: mod_base = OTHER; note = 2'-O-methylcytidine-3'-phosphate
  modified_base 13: mod_base = OTHER; note = 2'-O-methylcytidine-3'-phosphate
  modified_base 14: mod_base = OTHER; note = 2'-fluoroadenosine-3'-phosphate
  modified_base 15: mod_base = OTHER; note = 2'-O-methylguanosine-3'-phosphate
  modified_base 16: mod_base = OTHER; note = 2'-fluorouridine-3'-phosphate
  modified_base 17: mod_base = OTHER; note = 2'-O-methylcytidine-3'-phosphate
  modified_base 18: mod_base = OTHER; note = 2'-O-methyluridine-3'-phosphate
  modified_base 19: mod_base = OTHER; note = 2'-O-methylguanosine-3'-phosphate
  modified_base 20: mod_base = OTHER; note = 2'-O-methylcytidine-3'-phosphate
  modified_base 21: mod_base = OTHER; note = 2'-O-methyladenosine-3'-phosphorothioate
  modified_base 22: mod_base = OTHER; note = 2'-O-methyluridine-3'-phosphorothioate
  modified_base 23: mod_base = OTHER; note = 2'-O-methyluridine-3'-phosphate
agcttcgtgacccagtctgcatt

SEQ ID NO: 1395 - RNA, 23 nt, synthetic construct
  misc_feature 1..23: note = Description of Artificial Sequence: Synthetic oligonucleotide
  source 1..23: mol_type = other RNA
  modified_base 1: mod_base = OTHER; note = 2'-O-methyladenosine-3'-phosphorothioate
  modified_base 2: mod_base = OTHER; note = 2'-fluoroguanosine-3'-phosphorothioate
  modified_base 3: mod_base = OTHER; note = 2'-O-methylguanosine-3'-phosphate
  modified_base 4: mod_base = OTHER; note = 2'-O-methyladenosine-3'-phosphate
  modified_base 5: mod_base = OTHER; note = 2'-O-methylguanosine-3'-phosphate
  modified_base 6: mod_base = OTHER; note = 2'-fluoroguanosine-3'-phosphate
  modified_base 7: mod_base = OTHER; note = 2'-O-methylguanosine-3'-phosphate
  modified_base 8: mod_base = OTHER; note = 2'-fluorocytidine-3'-phosphate
  modified_base 9: mod_base = OTHER; note = 2'-fluorocytidine-3'-phosphate
  modified_base 10: mod_base = OTHER; note = 2'-O-methyluridine-3'-phosphate
  modified_base 11: mod_base = OTHER; note = 2'-O-methyluridine-3'-phosphate
  modified_base 12: mod_base = OTHER; note = 2'-O-methylcytidine-3'-phosphate
  modified_base 13: mod_base = OTHER; note = 2'-O-methyluridine-3'-phosphate
  modified_base 14: mod_base = OTHER; note = 2'-fluorouridine-3'-phosphate
  modified_base 15: mod_base = OTHER; note = 2'-O-methylguanosine-3'-phosphate
  modified_base 16: mod_base = OTHER; note = 2'-fluoroguanosine-3'-phosphate
  modified_base 17: mod_base = OTHER; note = 2'-O-methyluridine-3'-phosphate
  modified_base 18: mod_base = OTHER; note = 2'-O-methylguanosine-3'-phosphate
  modified_base 19: mod_base = OTHER; note = 2'-O-methyluridine-3'-phosphate
  modified_base 20: mod_base = OTHER; note = 2'-O-methyluridine-3'-phosphate
  modified_base 21: mod_base = OTHER; note = 2'-O-methyladenosine-3'-phosphorothioate
  modified_base 22: mod_base = OTHER; note = 2'-O-methylguanosine-3'-phosphorothioate
  modified_base 23: mod_base = OTHER; note = 2'-O-methyluridine-3'-phosphate
aggagggccttcttggtgttagt

SEQ ID NO: 1396 - RNA, 23 nt, synthetic construct
  misc_feature 1..23: note = Description of Artificial Sequence: Synthetic oligonucleotide
  source 1..23: mol_type = other RNA
  modified_base 1: mod_base = OTHER; note = 2'-O-methyladenosine-3'-phosphorothioate
  modified_base 2: mod_base = OTHER; note = 2'-fluoroadenosine-3'-phosphorothioate
  modified_base 3: mod_base = OTHER; note = 2'-O-methylcytidine-3'-phosphate
  modified_base 4: mod_base = OTHER; note = 2'-O-methylguanosine-3'-phosphate
  modified_base 5: mod_base = OTHER; note = 2'-O-methyluridine-3'-phosphate
  modified_base 6: mod_base = OTHER; note = 2'-fluorocytidine-3'-phosphate
  modified_base 7: mod_base = OTHER; note = 2'-O-methyladenosine-3'-phosphate
  modified_base 8: mod_base = OTHER; note = 2'-fluorouridine-3'-phosphate
  modified_base 9: mod_base = OTHER; note = 2'-fluorocytidine-3'-phosphate
  modified_base 10: mod_base = OTHER; note = 2'-O-methyluridine-3'-phosphate
  modified_base 11: mod_base = OTHER; note = 2'-O-methylguanosine-3'-phosphate
  modified_base 12: mod_base = OTHER; note = 2'-O-methylguanosine-3'-phosphate
  modified_base 13: mod_base = OTHER; note = 2'-O-methylcytidine-3'-phosphate
  modified_base 14: mod_base = OTHER; note = 2'-fluorocytidine-3'-phosphate
  modified_base 15: mod_base = OTHER; note = 2'-O-methyladenosine-3'-phosphate
  modified_base 16: mod_base = OTHER; note = 2'-fluoroguanosine-3'-phosphate
  modified_base 17: mod_base = OTHER; note = 2'-O-methylcytidine-3'-phosphate
  modified_base 18: mod_base = OTHER; note = 2'-O-methyluridine-3'-phosphate
  modified_base 19: mod_base = OTHER; note = 2'-O-methylcytidine-3'-phosphate
  modified_base 20: mod_base = OTHER; note = 2'-O-methyladenosine-3'-phosphate
  modified_base 21: mod_base = OTHER; note = 2'-O-methyluridine-3'-phosphorothioate
  modified_base 22: mod_base = OTHER; note = 2'-O-methylcytidine-3'-phosphorothioate
  modified_base 23: mod_base = OTHER; note = 2'-O-methyladenosine-3'-phosphate
aacgtcatctggccagctcatca

SEQ ID NO: 1397 - RNA, 23 nt, synthetic construct
  misc_feature 1..23: note = Description of Artificial Sequence: Synthetic oligonucleotide
  source 1..23: mol_type = other RNA
  modified_base 1: mod_base = OTHER; note = 2'-O-methyladenosine-3'-phosphorothioate
  modified_base 2: mod_base = OTHER; note = 2'-fluorocytidine-3'-phosphorothioate
  modified_base 3: mod_base = OTHER; note = 2'-O-methyluridine-3'-phosphate
  modified_base 4: mod_base = OTHER; note = 2'-O-methyluridine-3'-phosphate
  modified_base 5: mod_base = OTHER; note = 2'-O-methylguanosine-3'-phosphate
  modified_base 6: mod_base = OTHER; note = 2'-fluorocytidine-3'-phosphate
  modified_base 7: mod_base = OTHER; note = 2'-O-methylcytidine-3'-phosphate
  modified_base 8: mod_base = OTHER; note = 2'-fluoroadenosine-3'-phosphate
  modified_base 9: mod_base = OTHER; note = 2'-fluoroadenosine-3'-phosphate
  modified_base 10: mod_base = OTHER; note = 2'-O-methyluridine-3'-phosphate
  modified_base 11: mod_base = OTHER; note = 2'-O-methylguanosine-3'-phosphate
  modified_base 12: mod_base = OTHER; note = 2'-O-methyluridine-3'-phosphate
  modified_base 13: mod_base = OTHER; note = 2'-O-methyladenosine-3'-phosphate
  modified_base 14: mod_base = OTHER; note = 2'-fluorouridine-3'-phosphate
  modified_base 15: mod_base = OTHER; note = 2'-O-methyladenosine-3'-phosphate
  modified_base 16: mod_base = OTHER; note = 2'-fluoroguanosine-3'-phosphate
  modified_base 17: mod_base = OTHER; note = 2'-O-methylcytidine-3'-phosphate
  modified_base 18: mod_base = OTHER; note = 2'-O-methyladenosine-3'-phosphate
  modified_base 19: mod_base = OTHER; note = 2'-O-methyladenosine-3'-phosphate
  modified_base 20: mod_base = OTHER; note = 2'-O-methylguanosine-3'-phosphate
  modified_base 21: mod_base = OTHER; note = 2'-O-methyluridine-3'-phosphorothioate
  modified_base 22: mod_base = OTHER; note = 2'-O-methylcytidine-3'-phosphorothioate
  modified_base 23: mod_base = OTHER; note = 2'-O-methylcytidine-3'-phosphate
acttgccaatgtatagcaagtcc

SEQ ID NO: 1398 - RNA, 23 nt, synthetic construct
  misc_feature 1..23: note = Description of Artificial Sequence: Synthetic oligonucleotide
  source 1..23: mol_type = other RNA
  modified_base 1: mod_base = OTHER; note = 2'-O-methyladenosine-3'-phosphorothioate
  modified_base 2: mod_base = OTHER; note = 2'-fluorouridine -3'-phosphorothioate
  modified_base 3: mod_base = OTHER; note = 2'-O-methyluridine-3'-phosphate
  modified_base 4: mod_base = OTHER; note = 2'-O-methylcytidine-3'-phosphate
  modified_base 5: mod_base = OTHER; note = 2'-O-methyladenosine-3'-phosphate
  modified_base 6: mod_base = OTHER; note = 2'-fluorouridine-3'-phosphate
  modified_base 7: mod_base = OTHER; note = 2'-O-methylcytidine-3'-phosphate
  modified_base 8: mod_base = OTHER; note = 2'-fluoroguanosine-3'-phosphate
  modified_base 9: mod_base = OTHER; note = 2'-fluoroadenosine-3'-phosphate
  modified_base 10: mod_base = OTHER; note = 2'-O-methyluridine-3'-phosphate
  modified_base 11: mod_base = OTHER; note = 2'-O-methylcytidine-3'-phosphate
  modified_base 12: mod_base = OTHER; note = 2'-O-methyladenosine-3'-phosphate
  modified_base 13: mod_base = OTHER; note = 2'-O-methyluridine-3'-phosphate
  modified_base 14: mod_base = OTHER; note = 2'-fluorouridine-3'-phosphate
  modified_base 15: mod_base = OTHER; note = 2'-O-methyluridine-3'-phosphate
  modified_base 16: mod_base = OTHER; note = 2'-fluoroguanosine-3'-phosphate
  modified_base 17: mod_base = OTHER; note = 2'-O-methylguanosine-3'-phosphate
  modified_base 18: mod_base = OTHER; note = 2'-O-methyluridine-3'-phosphate
  modified_base 19: mod_base = OTHER; note = 2'-O-methyladenosine-3'-phosphate
  modified_base 20: mod_base = OTHER; note = 2'-O-methylguanosine-3'-phosphate
  modified_base 21: mod_base = OTHER; note = 2'-O-methyladenosine-3'-phosphorothioate
  modified_base 22: mod_base = OTHER; note = 2'-O-methyladenosine-3'-phosphorothioate
  modified_base 23: mod_base = OTHER; note = 2'-O-methyladenosine-3'-phosphate
attcatcgatcatttggtagaaa

SEQ ID NO: 1399 - RNA, 23 nt, synthetic construct
  misc_feature 1..23: note = Description of Artificial Sequence: Synthetic oligonucleotide
  source 1..23: mol_type = other RNA
  modified_base 1: mod_base = OTHER; note = 2'-O-methyladenosine-3'-phosphorothioate
  modified_base 2: mod_base = OTHER; note = 2'-fluorocytidine-3'-phosphorothioate
  modified_base 3: mod_base = OTHER; note = 2'-O-methylcytidine-3'-phosphate
  modified_base 4: mod_base = OTHER; note = 2'-O-methyluridine-3'-phosphate
  modified_base 5: mod_base = OTHER; note = 2'-O-methyluridine-3'-phosphate
  modified_base 6: mod_base = OTHER; note = 2'-fluorocytidine-3'-phosphate
  modified_base 7: mod_base = OTHER; note = 2'-O-methylcytidine-3'-phosphate
  modified_base 8: mod_base = OTHER; note = 2'-fluorouridine-3'-phosphate
  modified_base 9: mod_base = OTHER; note = 2'-fluoroguanosine-3'-phosphate
  modified_base 10: mod_base = OTHER; note = 2'-O-methyluridine-3'-phosphate
  modified_base 11: mod_base = OTHER; note = 2'-O-methylguanosine-3'-phosphate
  modified_base 12: mod_base = OTHER; note = 2'-O-methyluridine-3'-phosphate
  modified_base 13: mod_base = OTHER; note = 2'-O-methyluridine-3'-phosphate
  modified_base 14: mod_base = OTHER; note = 2'-fluorocytidine-3'-phosphate
  modified_base 15: mod_base = OTHER; note = 2'-O-methylcytidine-3'-phosphate
  modified_base 16: mod_base = OTHER; note = 2'-fluorocytidine-3'-phosphate
  modified_base 17: mod_base = OTHER; note = 2'-O-methyladenosine-3'-phosphate
  modified_base 18: mod_base = OTHER; note = 2'-O-methyladenosine-3'-phosphate
  modified_base 19: mod_base = OTHER; note = 2'-O-methyladenosine-3'-phosphate
  modified_base 20: mod_base = OTHER; note = 2'-O-methylcytidine-3'-phosphate
  modified_base 21: mod_base = OTHER; note = 2'-O-methylcytidine-3'-phosphorothioate
  modified_base 22: mod_base = OTHER; note = 2'-O-methyladenosine-3'-phosphorothioate
  modified_base 23: mod_base = OTHER; note = 2'-O-methyluridine-3'-phosphate
accttcctgtgttcccaaaccat

SEQ ID NO: 1400 - RNA, 23 nt, synthetic construct
  misc_feature 1..23: note = Description of Artificial Sequence: Synthetic oligonucleotide
  source 1..23: mol_type = other RNA
  modified_base 1: mod_base = OTHER; note = 2'-O-methyladenosine-3'-phosphorothioate
  modified_base 2: mod_base = OTHER; note = 2'-fluorouridine -3'-phosphorothioate
  modified_base 3: mod_base = OTHER; note = 2'-O-methylguanosine-3'-phosphate
  modified_base 4: mod_base = OTHER; note = 2'-O-methyladenosine-3'-phosphate
  modified_base 5: mod_base = OTHER; note = 2'-O-methylguanosine-3'-phosphate
  modified_base 6: mod_base = OTHER; note = 2'-fluoroadenosine-3'-phosphate
  modified_base 7: mod_base = OTHER; note = 2'-O-methyluridine-3'-phosphate
  modified_base 8: mod_base = OTHER; note = 2'-fluorocytidine-3'-phosphate
  modified_base 9: mod_base = OTHER; note = 2'-fluorouridine-3'-phosphate
  modified_base 10: mod_base = OTHER; note = 2'-O-methyluridine-3'-phosphate
  modified_base 11: mod_base = OTHER; note = 2'-O-methylguanosine-3'-phosphate
  modified_base 12: mod_base = OTHER; note = 2'-O-methylguanosine-3'-phosphate
  modified_base 13: mod_base = OTHER; note = 2'-O-methylcytidine-3'-phosphate
  modified_base 14: mod_base = OTHER; note = 2'-fluorocytidine-3'-phosphate
  modified_base 15: mod_base = OTHER; note = 2'-O-methyluridine-3'-phosphate
  modified_base 16: mod_base = OTHER; note = 2'-fluoroguanosine-3'-phosphate
  modified_base 17: mod_base = OTHER; note = 2'-O-methylcytidine-3'-phosphate
  modified_base 18: mod_base = OTHER; note = 2'-O-methylcytidine-3'-phosphate
  modified_base 19: mod_base = OTHER; note = 2'-O-methyladenosine-3'-phosphate
  modified_base 20: mod_base = OTHER; note = 2'-O-methyluridine-3'-phosphate
  modified_base 21: mod_base = OTHER; note = 2'-O-methylguanosine-3'-phosphorothioate
  modified_base 22: mod_base = OTHER; note = 2'-O-methylguanosine-3'-phosphorothioate
  modified_base 23: mod_base = OTHER; note = 2'-O-methyluridine-3'-phosphate
atgagatcttggcctgccatggt

SEQ ID NO: 1401 - RNA, 23 nt, synthetic construct
  misc_feature 1..23: note = Description of Artificial Sequence: Synthetic oligonucleotide
  source 1..23: mol_type = other RNA
  modified_base 1: mod_base = OTHER; note = 2'-O-methyladenosine-3'-phosphorothioate
  modified_base 2: mod_base = OTHER; note = 2'-fluorocytidine-3'-phosphorothioate
  modified_base 3: mod_base = OTHER; note = 2'-O-methyladenosine-3'-phosphate
  modified_base 4: mod_base = OTHER; note = 2'-O-methyluridine-3'-phosphate
  modified_base 5: mod_base = OTHER; note = 2'-O-methyladenosine-3'-phosphate
  modified_base 6: mod_base = OTHER; note = 2'-fluorocytidine-3'-phosphate
  modified_base 7: mod_base = OTHER; note = 2'-O-methyladenosine-3'-phosphate
  modified_base 8: mod_base = OTHER; note = 2'-fluoroguanosine-3'-phosphate
  modified_base 9: mod_base = OTHER; note = 2'-fluorocytidine-3'-phosphate
  modified_base 10: mod_base = OTHER; note = 2'-O-methyluridine-3'-phosphate
  modified_base 11: mod_base = OTHER; note = 2'-O-methylcytidine-3'-phosphate
  modified_base 12: mod_base = OTHER; note = 2'-O-methyluridine-3'-phosphate
  modified_base 13: mod_base = OTHER; note = 2'-O-methylcytidine-3'-phosphate
  modified_base 14: mod_base = OTHER; note = 2'-fluoroguanosine-3'-phosphate
  modified_base 15: mod_base = OTHER; note = 2'-O-methyluridine-3'-phosphate
  modified_base 16: mod_base = OTHER; note = 2'-fluoroguanosine-3'-phosphate
  modified_base 17: mod_base = OTHER; note = 2'-O-methyluridine-3'-phosphate
  modified_base 18: mod_base = OTHER; note = 2'-O-methylcytidine-3'-phosphate
  modified_base 19: mod_base = OTHER; note = 2'-O-methylcytidine-3'-phosphate
  modified_base 20: mod_base = OTHER; note = 2'-O-methylcytidine-3'-phosphate
  modified_base 21: mod_base = OTHER; note = 2'-O-methyluridine-3'-phosphorothioate
  modified_base 22: mod_base = OTHER; note = 2'-O-methyluridine-3'-phosphorothioate
  modified_base 23: mod_base = OTHER; note = 2'-O-methyluridine-3'-phosphate
acatacagctctcgtgtcccttt

SEQ ID NO: 1402 - RNA, 23 nt, synthetic construct
  misc_feature 1..23: note = Description of Artificial Sequence: Synthetic oligonucleotide
  source 1..23: mol_type = other RNA
  modified_base 1: mod_base = OTHER; note = 2'-O-methyladenosine-3'-phosphorothioate
  modified_base 2: mod_base = OTHER; note = 2'-fluorocytidine-3'-phosphorothioate
  modified_base 3: mod_base = OTHER; note = 2'-O-methyluridine-3'-phosphate
  modified_base 4: mod_base = OTHER; note = 2'-O-methyluridine-3'-phosphate
  modified_base 5: mod_base = OTHER; note = 2'-O-methylguanosine-3'-phosphate
  modified_base 6: mod_base = OTHER; note = 2'-fluoroadenosine-3'-phosphate
  modified_base 7: mod_base = OTHER; note = 2'-O-methyluridine-3'-phosphate
  modified_base 8: mod_base = OTHER; note = 2'-fluorouridine-3'-phosphate
  modified_base 9: mod_base = OTHER; note = 2'-fluoroguanosine-3'-phosphate
  modified_base 10: mod_base = OTHER; note = 2'-O-methyladenosine-3'-phosphate
  modified_base 11: mod_base = OTHER; note = 2'-O-methylguanosine-3'-phosphate
  modified_base 12: mod_base = OTHER; note = 2'-O-methyluridine-3'-phosphate
  modified_base 13: mod_base = OTHER; note = 2'-O-methylguanosine-3'-phosphate
  modified_base 14: mod_base = OTHER; note = 2'-fluorouridine-3'-phosphate
  modified_base 15: mod_base = OTHER; note = 2'-O-methyluridine-3'-phosphate
  modified_base 16: mod_base = OTHER; note = 2'-fluorocytidine-3'-phosphate
  modified_base 17: mod_base = OTHER; note = 2'-O-methylcytidine-3'-phosphate
  modified_base 18: mod_base = OTHER; note = 2'-O-methyluridine-3'-phosphate
  modified_base 19: mod_base = OTHER; note = 2'-O-methyluridine-3'-phosphate
  modified_base 20: mod_base = OTHER; note = 2'-O-methylguanosine-3'-phosphate
  modified_base 21: mod_base = OTHER; note = 2'-O-methyluridine-3'-phosphorothioate
  modified_base 22: mod_base = OTHER; note = 2'-O-methylcytidine-3'-phosphorothioate
  modified_base 23: mod_base = OTHER; note = 2'-O-methyladenosine-3'-phosphate
acttgattgagtgttccttgtca

SEQ ID NO: 1403 - RNA, 23 nt, synthetic construct
  misc_feature 1..23: note = Description of Artificial Sequence: Synthetic oligonucleotide
  source 1..23: mol_type = other RNA
  modified_base 1: mod_base = OTHER; note = 2'-O-methyladenosine-3'-phosphorothioate
  modified_base 2: mod_base = OTHER; note = 2'-fluorouridine -3'-phosphorothioate
  modified_base 3: mod_base = OTHER; note = 2'-O-methylcytidine-3'-phosphate
  modified_base 4: mod_base = OTHER; note = 2'-O-methyluridine-3'-phosphate
  modified_base 5: mod_base = OTHER; note = 2'-O-methyladenosine-3'-phosphate
  modified_base 6: mod_base = OTHER; note = 2'-fluorouridine-3'-phosphate
  modified_base 7: mod_base = OTHER; note = 2'-O-methylcytidine-3'-phosphate
  modified_base 8: mod_base = OTHER; note = 2'-fluorouridine-3'-phosphate
  modified_base 9: mod_base = OTHER; note = 2'-fluorocytidine-3'-phosphate
  modified_base 10: mod_base = OTHER; note = 2'-O-methylcytidine-3'-phosphate
  modified_base 11: mod_base = OTHER; note = 2'-O-methyladenosine-3'-phosphate
  modified_base 12: mod_base = OTHER; note = 2'-O-methylguanosine-3'-phosphate
  modified_base 13: mod_base = OTHER; note = 2'-O-methylguanosine-3'-phosphate
  modified_base 14: mod_base = OTHER; note = 2'-fluorouridine-3'-phosphate
  modified_base 15: mod_base = OTHER; note = 2'-O-methylcytidine-3'-phosphate
  modified_base 16: mod_base = OTHER; note = 2'-fluorocytidine-3'-phosphate
  modified_base 17: mod_base = OTHER; note = 2'-O-methylcytidine-3'-phosphate
  modified_base 18: mod_base = OTHER; note = 2'-O-methylguanosine-3'-phosphate
  modified_base 19: mod_base = OTHER; note = 2'-O-methylcytidine-3'-phosphate
  modified_base 20: mod_base = OTHER; note = 2'-O-methyluridine-3'-phosphate
  modified_base 21: mod_base = OTHER; note = 2'-O-methyluridine-3'-phosphorothioate
  modified_base 22: mod_base = OTHER; note = 2'-O-methylcytidine-3'-phosphorothioate
  modified_base 23: mod_base = OTHER; note = 2'-O-methyluridine-3'-phosphate
atctatctccaggtcccgcttct

SEQ ID NO: 1404 - RNA, 23 nt, synthetic construct
  misc_feature 1..23: note = Description of Artificial Sequence: Synthetic oligonucleotide
  source 1..23: mol_type = other RNA
  modified_base 1: mod_base = OTHER; note = 2'-O-methyladenosine-3'-phosphorothioate
  modified_base 2: mod_base = OTHER; note = 2'-fluorouridine -3'-phosphorothioate
  modified_base 3: mod_base = OTHER; note = 2'-O-methylcytidine-3'-phosphate
  modified_base 4: mod_base = OTHER; note = 2'-O-methyladenosine-3'-phosphate
  modified_base 5: mod_base = OTHER; note = 2'-O-methylguanosine-3'-phosphate
  modified_base 6: mod_base = OTHER; note = 2'-fluoroadenosine-3'-phosphate
  modified_base 7: mod_base = OTHER; note = 2'-O-methylcytidine-3'-phosphate
  modified_base 8: mod_base = OTHER; note = 2'-fluoroadenosine-3'-phosphate
  modified_base 9: mod_base = OTHER; note = 2'-fluorocytidine-3'-phosphate
  modified_base 10: mod_base = OTHER; note = 2'-O-methyladenosine-3'-phosphate
  modified_base 11: mod_base = OTHER; note = 2'-O-methyladenosine-3'-phosphate
  modified_base 12: mod_base = OTHER; note = 2'-O-methyladenosine-3'-phosphate
  modified_base 13: mod_base = OTHER; note = 2'-O-methylcytidine-3'-phosphate
  modified_base 14: mod_base = OTHER; note = 2'-fluoroadenosine-3'-phosphate
  modified_base 15: mod_base = OTHER; note = 2'-O-methylguanosine-3'-phosphate
  modified_base 16: mod_base = OTHER; note = 2'-fluoroadenosine-3'-phosphate
  modified_base 17: mod_base = OTHER; note = 2'-O-methylguanosine-3'-phosphate
  modified_base 18: mod_base = OTHER; note = 2'-O-methylcytidine-3'-phosphate
  modified_base 19: mod_base = OTHER; note = 2'-O-methyluridine-3'-phosphate
  modified_base 20: mod_base = OTHER; note = 2'-O-methyluridine-3'-phosphate
  modified_base 21: mod_base = OTHER; note = 2'-O-methyluridine-3'-phosphorothioate
  modified_base 22: mod_base = OTHER; note = 2'-O-methylguanosine-3'-phosphorothioate
  modified_base 23: mod_base = OTHER; note = 2'-O-methyladenosine-3'-phosphate
atcagacacaaacagagctttga

SEQ ID NO: 1405 - RNA, 23 nt, synthetic construct
  misc_feature 1..23: note = Description of Artificial Sequence: Synthetic oligonucleotide
  source 1..23: mol_type = other RNA
  modified_base 1: mod_base = OTHER; note = 2'-O-methyladenosine-3'-phosphorothioate
  modified_base 2: mod_base = OTHER; note = 2'-fluorouridine -3'-phosphorothioate
  modified_base 3: mod_base = OTHER; note = 2'-O-methylguanosine-3'-phosphate
  modified_base 4: mod_base = OTHER; note = 2'-O-methylguanosine-3'-phosphate
  modified_base 5: mod_base = OTHER; note = 2'-O-methyladenosine-3'-phosphate
  modified_base 6: mod_base = OTHER; note = 2'-fluoroguanosine-3'-phosphate
  modified_base 7: mod_base = OTHER; note = 2'-O-methyluridine-3'-phosphate
  modified_base 8: mod_base = OTHER; note = 2'-fluorouridine-3'-phosphate
  modified_base 9: mod_base = OTHER; note = 2'-fluorouridine-3'-phosphate
  modified_base 10: mod_base = OTHER; note = 2'-O-methylcytidine-3'-phosphate
  modified_base 11: mod_base = OTHER; note = 2'-O-methyluridine-3'-phosphate
  modified_base 12: mod_base = OTHER; note = 2'-O-methylcytidine-3'-phosphate
  modified_base 13: mod_base = OTHER; note = 2'-O-methylcytidine-3'-phosphate
  modified_base 14: mod_base = OTHER; note = 2'-fluorouridine-3'-phosphate
  modified_base 15: mod_base = OTHER; note = 2'-O-methyluridine-3'-phosphate
  modified_base 16: mod_base = OTHER; note = 2'-fluorocytidine-3'-phosphate
  modified_base 17: mod_base = OTHER; note = 2'-O-methyladenosine-3'-phosphate
  modified_base 18: mod_base = OTHER; note = 2'-O-methylguanosine-3'-phosphate
  modified_base 19: mod_base = OTHER; note = 2'-O-methylcytidine-3'-phosphate
  modified_base 20: mod_base = OTHER; note = 2'-O-methylcytidine-3'-phosphate
  modified_base 21: mod_base = OTHER; note = 2'-O-methyladenosine-3'-phosphorothioate
  modified_base 22: mod_base = OTHER; note = 2'-O-methylguanosine-3'-phosphorothioate
  modified_base 23: mod_base = OTHER; note = 2'-O-methylguanosine-3'-phosphate
atggagtttctccttcagccagg

SEQ ID NO: 1406 - DNA, 23 bp, unidentified
  misc_feature 1..23: note = Description of Unknown: Target sequence
  source 1..23: mol_type = unassigned DNA
ggaagggaatgtgaccaggtcta

SEQ ID NO: 1407 - DNA, 23 bp, unidentified
  misc_feature 1..23: note = Description of Unknown: Target sequence
  source 1..23: mol_type = unassigned DNA
gtctggagtttcagcttggacac

SEQ ID NO: 1408 - DNA, 23 bp, unidentified
  misc_feature 1..23: note = Description of Unknown: Target sequence
  source 1..23: mol_type = unassigned DNA
agccaagcagacaagcaaagcaa

SEQ ID NO: 1409 - DNA, 23 bp, unidentified
  misc_feature 1..23: note = Description of Unknown: Target sequence
  source 1..23: mol_type = unassigned DNA
aagccaggacacaccatcctgcc

SEQ ID NO: 1410 - DNA, 23 bp, unidentified
  misc_feature 1..23: note = Description of Unknown: Target sequence
  source 1..23: mol_type = unassigned DNA
gcccagcttctctcctgccttcc

SEQ ID NO: 1411 - DNA, 23 bp, unidentified
  misc_feature 1..23: note = Description of Unknown: Target sequence
  source 1..23: mol_type = unassigned DNA
tctgcctgatgccctttatcttg

SEQ ID NO: 1412 - DNA, 23 bp, unidentified
  misc_feature 1..23: note = Description of Unknown: Target sequence
  source 1..23: mol_type = unassigned DNA
cttgggcctcttgtctggaggtg

SEQ ID NO: 1413 - DNA, 23 bp, unidentified
  misc_feature 1..23: note = Description of Unknown: Target sequence
  source 1..23: mol_type = unassigned DNA
gaccaccactccatggtctttgg

SEQ ID NO: 1414 - DNA, 23 bp, unidentified
  misc_feature 1..23: note = Description of Unknown: Target sequence
  source 1..23: mol_type = unassigned DNA
gctccttccgacttctccaagag

SEQ ID NO: 1415 - DNA, 23 bp, unidentified
  misc_feature 1..23: note = Description of Unknown: Target sequence
  source 1..23: mol_type = unassigned DNA
ccaggcactggagtacgtgtgtc

SEQ ID NO: 1416 - DNA, 23 bp, unidentified
  misc_feature 1..23: note = Description of Unknown: Target sequence
  source 1..23: mol_type = unassigned DNA
cgtgtgtccttctggcttctacc

SEQ ID NO: 1417 - DNA, 23 bp, unidentified
  misc_feature 1..23: note = Description of Unknown: Target sequence
  source 1..23: mol_type = unassigned DNA
tctacccgtaccctgtgcagaca

SEQ ID NO: 1418 - DNA, 23 bp, unidentified
  misc_feature 1..23: note = Description of Unknown: Target sequence
  source 1..23: mol_type = unassigned DNA
gcagacacgtacctgcagatcta

SEQ ID NO: 1419 - DNA, 23 bp, unidentified
  misc_feature 1..23: note = Description of Unknown: Target sequence
  source 1..23: mol_type = unassigned DNA
gaagactcaagaccaaaagactg

SEQ ID NO: 1420 - DNA, 23 bp, unidentified
  misc_feature 1..23: note = Description of Unknown: Target sequence
  source 1..23: mol_type = unassigned DNA
agagtgcagagcaatccactgtc

SEQ ID NO: 1421 - DNA, 23 bp, unidentified
  misc_feature 1..23: note = Description of Unknown: Target sequence
  source 1..23: mol_type = unassigned DNA
agaccacacgacttcgagaacgg

SEQ ID NO: 1422 - DNA, 23 bp, unidentified
  misc_feature 1..23: note = Description of Unknown: Target sequence
  source 1..23: mol_type = unassigned DNA
tccctactacaatgtgagtgatg

SEQ ID NO: 1423 - DNA, 23 bp, unidentified
  misc_feature 1..23: note = Description of Unknown: Target sequence
  source 1..23: mol_type = unassigned DNA
agtgatgagatctctttccactg

SEQ ID NO: 1424 - DNA, 23 bp, unidentified
  misc_feature 1..23: note = Description of Unknown: Target sequence
  source 1..23: mol_type = unassigned DNA
ccactgctatgacggttacactc

SEQ ID NO: 1425 - DNA, 23 bp, unidentified
  misc_feature 1..23: note = Description of Unknown: Target sequence
  source 1..23: mol_type = unassigned DNA
cgcacctgccaagtgaatggccg

SEQ ID NO: 1426 - DNA, 23 bp, unidentified
  misc_feature 1..23: note = Description of Unknown: Target sequence
  source 1..23: mol_type = unassigned DNA
acagcgatctgtgacaacggagc

SEQ ID NO: 1427 - DNA, 23 bp, unidentified
  misc_feature 1..23: note = Description of Unknown: Target sequence
  source 1..23: mol_type = unassigned DNA
cccattggcacaaggaaggtggg

SEQ ID NO: 1428 - DNA, 23 bp, unidentified
  misc_feature 1..23: note = Description of Unknown: Target sequence
  source 1..23: mol_type = unassigned DNA
accgccttgaagacagcgtcacc

SEQ ID NO: 1429 - DNA, 23 bp, unidentified
  misc_feature 1..23: note = Description of Unknown: Target sequence
  source 1..23: mol_type = unassigned DNA
gcggcgaacgtgtcaggaaggtg

SEQ ID NO: 1430 - DNA, 23 bp, unidentified
  misc_feature 1..23: note = Description of Unknown: Target sequence
  source 1..23: mol_type = unassigned DNA
tcctgccaagactccttcatgta

SEQ ID NO: 1431 - DNA, 23 bp, unidentified
  misc_feature 1..23: note = Description of Unknown: Target sequence
  source 1..23: mol_type = unassigned DNA
tggccgaagctttcctgtcttcc

SEQ ID NO: 1432 - DNA, 23 bp, unidentified
  misc_feature 1..23: note = Description of Unknown: Target sequence
  source 1..23: mol_type = unassigned DNA
tcttccctgacagagaccataga

SEQ ID NO: 1433 - DNA, 23 bp, unidentified
  misc_feature 1..23: note = Description of Unknown: Target sequence
  source 1..23: mol_type = unassigned DNA
aaggagtcgatgctgaggatggg

SEQ ID NO: 1434 - DNA, 23 bp, unidentified
  misc_feature 1..23: note = Description of Unknown: Target sequence
  source 1..23: mol_type = unassigned DNA
aacaacagaagcggaagatcgtc

SEQ ID NO: 1435 - DNA, 23 bp, unidentified
  misc_feature 1..23: note = Description of Unknown: Target sequence
  source 1..23: mol_type = unassigned DNA
cttcaggctccatgaacatctac

SEQ ID NO: 1436 - DNA, 23 bp, unidentified
  misc_feature 1..23: note = Description of Unknown: Target sequence
  source 1..23: mol_type = unassigned DNA
gctagatggatcagacagcattg

SEQ ID NO: 1437 - DNA, 23 bp, unidentified
  misc_feature 1..23: note = Description of Unknown: Target sequence
  source 1..23: mol_type = unassigned DNA
gggccagcaacttcacaggagcc

SEQ ID NO: 1438 - DNA, 23 bp, unidentified
  misc_feature 1..23: note = Description of Unknown: Target sequence
  source 1..23: mol_type = unassigned DNA
aaagtgtctagtcaacttaattg

SEQ ID NO: 1439 - DNA, 23 bp, unidentified
  misc_feature 1..23: note = Description of Unknown: Target sequence
  source 1..23: mol_type = unassigned DNA
taattgagaaggtggcaagttat

SEQ ID NO: 1440 - DNA, 23 bp, unidentified
  misc_feature 1..23: note = Description of Unknown: Target sequence
  source 1..23: mol_type = unassigned DNA
ttatggtgtgaagccaagatatg

SEQ ID NO: 1441 - DNA, 23 bp, unidentified
  misc_feature 1..23: note = Description of Unknown: Target sequence
  source 1..23: mol_type = unassigned DNA
aagatatggtctagtgacatatg

SEQ ID NO: 1442 - DNA, 23 bp, unidentified
  misc_feature 1..23: note = Description of Unknown: Target sequence
  source 1..23: mol_type = unassigned DNA
aaatttgggtcaaagtgtctgaa

SEQ ID NO: 1443 - DNA, 23 bp, unidentified
  misc_feature 1..23: note = Description of Unknown: Target sequence
  source 1..23: mol_type = unassigned DNA
gcagacagcagtaatgcagactg

SEQ ID NO: 1444 - DNA, 23 bp, unidentified
  misc_feature 1..23: note = Description of Unknown: Target sequence
  source 1..23: mol_type = unassigned DNA
agcagctcaatgaaatcaattat

SEQ ID NO: 1445 - DNA, 23 bp, unidentified
  misc_feature 1..23: note = Description of Unknown: Target sequence
  source 1..23: mol_type = unassigned DNA
atgaagaccacaagttgaagtca

SEQ ID NO: 1446 - DNA, 23 bp, unidentified
  misc_feature 1..23: note = Description of Unknown: Target sequence
  source 1..23: mol_type = unassigned DNA
cagggactaacaccaagaaggcc

SEQ ID NO: 1447 - DNA, 23 bp, unidentified
  misc_feature 1..23: note = Description of Unknown: Target sequence
  source 1..23: mol_type = unassigned DNA
tccaggcagtgtacagcatgatg

SEQ ID NO: 1448 - DNA, 23 bp, unidentified
  misc_feature 1..23: note = Description of Unknown: Target sequence
  source 1..23: mol_type = unassigned DNA
ctggccagatgacgtccctcctg

SEQ ID NO: 1449 - DNA, 23 bp, unidentified
  misc_feature 1..23: note = Description of Unknown: Target sequence
  source 1..23: mol_type = unassigned DNA
catgtcatcatcctcatgactga

SEQ ID NO: 1450 - DNA, 23 bp, unidentified
  misc_feature 1..23: note = Description of Unknown: Target sequence
  source 1..23: mol_type = unassigned DNA
tgactgatggattgcacaacatg

SEQ ID NO: 1451 - DNA, 23 bp, unidentified
  misc_feature 1..23: note = Description of Unknown: Target sequence
  source 1..23: mol_type = unassigned DNA
aattactgtcattgatgagatcc

SEQ ID NO: 1452 - DNA, 23 bp, unidentified
  misc_feature 1..23: note = Description of Unknown: Target sequence
  source 1..23: mol_type = unassigned DNA
gggacttgctatacattggcaag

SEQ ID NO: 1453 - DNA, 23 bp, unidentified
  misc_feature 1..23: note = Description of Unknown: Target sequence
  source 1..23: mol_type = unassigned DNA
aaaacccaagggaggattatctg

SEQ ID NO: 1454 - DNA, 23 bp, unidentified
  misc_feature 1..23: note = Description of Unknown: Target sequence
  source 1..23: mol_type = unassigned DNA
attatctggatgtctatgtgttt

SEQ ID NO: 1455 - DNA, 23 bp, unidentified
  misc_feature 1..23: note = Description of Unknown: Target sequence
  source 1..23: mol_type = unassigned DNA
tcgggcctttggtgaaccaagtg

SEQ ID NO: 1456 - DNA, 23 bp, unidentified
  misc_feature 1..23: note = Description of Unknown: Target sequence
  source 1..23: mol_type = unassigned DNA
accaagtgaacatcaatgctttg

SEQ ID NO: 1457 - DNA, 23 bp, unidentified
  misc_feature 1..23: note = Description of Unknown: Target sequence
  source 1..23: mol_type = unassigned DNA
gcttccaagaaagacaatgagca

SEQ ID NO: 1458 - DNA, 23 bp, unidentified
  misc_feature 1..23: note = Description of Unknown: Target sequence
  source 1..23: mol_type = unassigned DNA
tgagcaacatgtgttcaaagtca

SEQ ID NO: 1459 - DNA, 23 bp, unidentified
  misc_feature 1..23: note = Description of Unknown: Target sequence
  source 1..23: mol_type = unassigned DNA
aagtcaaggatatggaaaacctg

SEQ ID NO: 1460 - DNA, 23 bp, unidentified
  misc_feature 1..23: note = Description of Unknown: Target sequence
  source 1..23: mol_type = unassigned DNA
tggaagatgttttctaccaaatg

SEQ ID NO: 1461 - DNA, 23 bp, unidentified
  misc_feature 1..23: note = Description of Unknown: Target sequence
  source 1..23: mol_type = unassigned DNA
tgatcgatgaaagccagtctctg

SEQ ID NO: 1462 - DNA, 23 bp, unidentified
  misc_feature 1..23: note = Description of Unknown: Target sequence
  source 1..23: mol_type = unassigned DNA
agtctctgagtctctgtggcatg

SEQ ID NO: 1463 - DNA, 23 bp, unidentified
  misc_feature 1..23: note = Description of Unknown: Target sequence
  source 1..23: mol_type = unassigned DNA
tttgggaacacaggaagggtacc

SEQ ID NO: 1464 - DNA, 23 bp, unidentified
  misc_feature 1..23: note = Description of Unknown: Target sequence
  source 1..23: mol_type = unassigned DNA
accgattaccacaagcaaccatg

SEQ ID NO: 1465 - DNA, 23 bp, unidentified
  misc_feature 1..23: note = Description of Unknown: Target sequence
  source 1..23: mol_type = unassigned DNA
tctcagtcattcgcccttcaaag

SEQ ID NO: 1466 - DNA, 23 bp, unidentified
  misc_feature 1..23: note = Description of Unknown: Target sequence
  source 1..23: mol_type = unassigned DNA
aagggacacgagagctgtatggg

SEQ ID NO: 1467 - DNA, 23 bp, unidentified
  misc_feature 1..23: note = Description of Unknown: Target sequence
  source 1..23: mol_type = unassigned DNA
ctgtggtgtctgagtactttgtg

SEQ ID NO: 1468 - DNA, 23 bp, unidentified
  misc_feature 1..23: note = Description of Unknown: Target sequence
  source 1..23: mol_type = unassigned DNA
gacagcagcacattgtttcactg

SEQ ID NO: 1469 - DNA, 23 bp, unidentified
  misc_feature 1..23: note = Description of Unknown: Target sequence
  source 1..23: mol_type = unassigned DNA
acaaggaacactcaatcaaggtc

SEQ ID NO: 1470 - DNA, 23 bp, unidentified
  misc_feature 1..23: note = Description of Unknown: Target sequence
  source 1..23: mol_type = unassigned DNA
gatagaagtagtcctatttcacc

SEQ ID NO: 1471 - DNA, 23 bp, unidentified
  misc_feature 1..23: note = Description of Unknown: Target sequence
  source 1..23: mol_type = unassigned DNA
cccaactacaacattaatgggaa

SEQ ID NO: 1472 - DNA, 23 bp, unidentified
  misc_feature 1..23: note = Description of Unknown: Target sequence
  source 1..23: mol_type = unassigned DNA
gaattcctgaattttatgactat

SEQ ID NO: 1473 - DNA, 23 bp, unidentified
  misc_feature 1..23: note = Description of Unknown: Target sequence
  source 1..23: mol_type = unassigned DNA
actatgacgttgccctgatcaag

SEQ ID NO: 1474 - DNA, 23 bp, unidentified
  misc_feature 1..23: note = Description of Unknown: Target sequence
  source 1..23: mol_type = unassigned DNA
aagctcaagaataagctgaaata

SEQ ID NO: 1475 - DNA, 23 bp, unidentified
  misc_feature 1..23: note = Description of Unknown: Target sequence
  source 1..23: mol_type = unassigned DNA
agactatcaggcccatttgtctc

SEQ ID NO: 1476 - DNA, 23 bp, unidentified
  misc_feature 1..23: note = Description of Unknown: Target sequence
  source 1..23: mol_type = unassigned DNA
cgagggaacaactcgagctttga

SEQ ID NO: 1477 - DNA, 23 bp, unidentified
  misc_feature 1..23: note = Description of Unknown: Target sequence
  source 1..23: mol_type = unassigned DNA
gcttcctccaactaccacttgcc

SEQ ID NO: 1478 - DNA, 23 bp, unidentified
  misc_feature 1..23: note = Description of Unknown: Target sequence
  source 1..23: mol_type = unassigned DNA
cacttgccagcaacaaaaggaag

SEQ ID NO: 1479 - DNA, 23 bp, unidentified
  misc_feature 1..23: note = Description of Unknown: Target sequence
  source 1..23: mol_type = unassigned DNA
cacaggatatcaaagctctgttt

SEQ ID NO: 1480 - DNA, 23 bp, unidentified
  misc_feature 1..23: note = Description of Unknown: Target sequence
  source 1..23: mol_type = unassigned DNA
gtttgtgtctgaggaggagaaaa

SEQ ID NO: 1481 - DNA, 23 bp, unidentified
  misc_feature 1..23: note = Description of Unknown: Target sequence
  source 1..23: mol_type = unassigned DNA
aaggaggtctacatcaagaatgg

SEQ ID NO: 1482 - DNA, 23 bp, unidentified
  misc_feature 1..23: note = Description of Unknown: Target sequence
  source 1..23: mol_type = unassigned DNA
ctgtgagagagatgctcaatatg

SEQ ID NO: 1483 - DNA, 23 bp, unidentified
  misc_feature 1..23: note = Description of Unknown: Target sequence
  source 1..23: mol_type = unassigned DNA
atgacaaagtcaaggacatctca

SEQ ID NO: 1484 - DNA, 23 bp, unidentified
  misc_feature 1..23: note = Description of Unknown: Target sequence
  source 1..23: mol_type = unassigned DNA
cctcggttcctttgtactggagg

SEQ ID NO: 1485 - DNA, 23 bp, unidentified
  misc_feature 1..23: note = Description of Unknown: Target sequence
  source 1..23: mol_type = unassigned DNA
aggagtgagtccctatgctgacc

SEQ ID NO: 1486 - DNA, 23 bp, unidentified
  misc_feature 1..23: note = Description of Unknown: Target sequence
  source 1..23: mol_type = unassigned DNA
aatacttgcagaggtgattctgg

SEQ ID NO: 1487 - DNA, 23 bp, unidentified
  misc_feature 1..23: note = Description of Unknown: Target sequence
  source 1..23: mol_type = unassigned DNA
atagttcacaagagaagtcgttt

SEQ ID NO: 1488 - DNA, 23 bp, unidentified
  misc_feature 1..23: note = Description of Unknown: Target sequence
  source 1..23: mol_type = unassigned DNA
tttcattcaagttggtgtaatca

SEQ ID NO: 1489 - DNA, 23 bp, unidentified
  misc_feature 1..23: note = Description of Unknown: Target sequence
  source 1..23: mol_type = unassigned DNA
gggagtagtggatgtctgcaaaa

SEQ ID NO: 1490 - DNA, 23 bp, unidentified
  misc_feature 1..23: note = Description of Unknown: Target sequence
  source 1..23: mol_type = unassigned DNA
aaaaccagaagcggcaaaagcag

SEQ ID NO: 1491 - DNA, 23 bp, unidentified
  misc_feature 1..23: note = Description of Unknown: Target sequence
  source 1..23: mol_type = unassigned DNA
gagactttcacatcaacctcttt

SEQ ID NO: 1492 - DNA, 23 bp, unidentified
  misc_feature 1..23: note = Description of Unknown: Target sequence
  source 1..23: mol_type = unassigned DNA
acctctttcaagtgctgccctgg

SEQ ID NO: 1493 - DNA, 23 bp, unidentified
  misc_feature 1..23: note = Description of Unknown: Target sequence
  source 1..23: mol_type = unassigned DNA
tgaaggagaaactccaagatgag

SEQ ID NO: 1494 - DNA, 23 bp, unidentified
  misc_feature 1..23: note = Description of Unknown: Target sequence
  source 1..23: mol_type = unassigned DNA
atgaggatttgggttttctataa

SEQ ID NO: 1495 - DNA, 23 bp, unidentified
  misc_feature 1..23: note = Description of Unknown: Target sequence
  source 1..23: mol_type = unassigned DNA
ggcgtgggattgaattaaaacag

SEQ ID NO: 1496 - RNA, 23 nt, unidentified
  misc_feature 1..23: note = Description of Unknown: Target sequence
  source 1..23: mol_type = unassigned RNA
aagcaagccaggacacaccatcc

SEQ ID NO: 1497 - RNA, 23 nt, unidentified
  misc_feature 1..23: note = Description of Unknown: Target sequence
  source 1..23: mol_type = unassigned RNA
agcttctctcctgccttccaacg

SEQ ID NO: 1498 - RNA, 23 nt, unidentified
  misc_feature 1..23: note = Description of Unknown: Target sequence
  source 1..23: mol_type = unassigned RNA
atcttgggcctcttgtctggagg

SEQ ID NO: 1499 - RNA, 23 nt, unidentified
  misc_feature 1..23: note = Description of Unknown: Target sequence
  source 1..23: mol_type = unassigned RNA
gtagagatcaaaggcggctcctt

SEQ ID NO: 1500 - RNA, 23 nt, unidentified
  misc_feature 1..23: note = Description of Unknown: Target sequence
  source 1..23: mol_type = unassigned RNA
gcactggagtacgtgtgtccttc

SEQ ID NO: 1501 - RNA, 23 nt, unidentified
  misc_feature 1..23: note = Description of Unknown: Target sequence
  source 1..23: mol_type = unassigned RNA
accctgaagactcaagaccaaaa

SEQ ID NO: 1502 - RNA, 23 nt, unidentified
  misc_feature 1..23: note = Description of Unknown: Target sequence
  source 1..23: mol_type = unassigned RNA
aagactgtcaggaaggcagagtg

SEQ ID NO: 1503 - RNA, 23 nt, unidentified
  misc_feature 1..23: note = Description of Unknown: Target sequence
  source 1..23: mol_type = unassigned RNA
attggcacaaggaaggtgggcag

SEQ ID NO: 1504 - RNA, 23 nt, unidentified
  misc_feature 1..23: note = Description of Unknown: Target sequence
  source 1..23: mol_type = unassigned RNA
taccgccttgaagacagcgtcac

SEQ ID NO: 1505 - RNA, 23 nt, unidentified
  misc_feature 1..23: note = Description of Unknown: Target sequence
  source 1..23: mol_type = unassigned RNA
gtctgaagcagacagcagtaatg

SEQ ID NO: 1506 - RNA, 23 nt, unidentified
  misc_feature 1..23: note = Description of Unknown: Target sequence
  source 1..23: mol_type = unassigned RNA
aatgcagactgggtcacgaagca

SEQ ID NO: 1507 - RNA, 23 nt, unidentified
  misc_feature 1..23: note = Description of Unknown: Target sequence
  source 1..23: mol_type = unassigned RNA
actaacaccaagaaggccctcca

SEQ ID NO: 1508 - RNA, 23 nt, unidentified
  misc_feature 1..23: note = Description of Unknown: Target sequence
  source 1..23: mol_type = unassigned RNA
tgatgagctggccagatgacgtc

SEQ ID NO: 1509 - RNA, 23 nt, unidentified
  misc_feature 1..23: note = Description of Unknown: Target sequence
  source 1..23: mol_type = unassigned RNA
ggacttgctatacattggcaagg

SEQ ID NO: 1510 - RNA, 23 nt, unidentified
  misc_feature 1..23: note = Description of Unknown: Target sequence
  source 1..23: mol_type = unassigned RNA
tttctaccaaatgatcgatgaaa

SEQ ID NO: 1511 - RNA, 23 nt, unidentified
  misc_feature 1..23: note = Description of Unknown: Target sequence
  source 1..23: mol_type = unassigned RNA
atggtttgggaacacaggaaggg

SEQ ID NO: 1512 - RNA, 23 nt, unidentified
  misc_feature 1..23: note = Description of Unknown: Target sequence
  source 1..23: mol_type = unassigned RNA
accatggcaggccaagatctcag

SEQ ID NO: 1513 - RNA, 23 nt, unidentified
  misc_feature 1..23: note = Description of Unknown: Target sequence
  source 1..23: mol_type = unassigned RNA
aaagggacacgagagctgtatgg

SEQ ID NO: 1514 - RNA, 23 nt, unidentified
  misc_feature 1..23: note = Description of Unknown: Target sequence
  source 1..23: mol_type = unassigned RNA
tgacaaggaacactcaatcaagg

SEQ ID NO: 1515 - RNA, 23 nt, unidentified
  misc_feature 1..23: note = Description of Unknown: Target sequence
  source 1..23: mol_type = unassigned RNA
agaagcgggacctggagatagaa

SEQ ID NO: 1516 - RNA, 23 nt, unidentified
  misc_feature 1..23: note = Description of Unknown: Target sequence
  source 1..23: mol_type = unassigned RNA
tcaaagctctgtttgtgtctgag

SEQ ID NO: 1517 - RNA, 23 nt, unidentified
  misc_feature 1..23: note = Description of Unknown: Target sequence
  source 1..23: mol_type = unassigned RNA
cctggctgaaggagaaactccaa

1. A double stranded ribonucleic acid (dsRNA) for inhibiting expression of complement factor B (CFB) in a cell,
(a) wherein said dsRNA comprises a sense strand and an antisense strand forming a double stranded region, wherein the antisense strand comprises a region of complementarity to an mRNA encoding CFB, and wherein the region of complementarity comprises at least 15 contiguous nucleotides differing by no more than 3 nucleotides from any one of the antisense nucleotide sequences in any one of Tables 2-7, 13, 16, 19 and 20; or
(b) wherein said dsRNA comprises a sense strand and an antisense strand forming a double stranded region, wherein the sense strand comprises at least 15 contiguous nucleotides differing by no more than three nucleotides from any one of the nucleotide sequence of nucleotides 633-665, 1133-1185, 1133-1173, 1133-1167, 1143-1173, 1540-1563, 1976-2002, 2386-2438, 2386-2418, 2386-2413, and 2389-1418 of SEQ ID NO: 1, and the antisense strand comprises at least 15 contiguous nucleotides from the corresponding nucleotide sequence of SEQ ID NO:8, where a substitution of a T with a U in either SEQ ID NO: 1 or SEQ ID NO: 8 does not count as a difference; or
(c) wherein said dsRNA comprises a sense strand and an antisense strand forming a double stranded region, wherein the sense strand comprises at least 15 contiguous nucleotides differing by no more than three nucleotides from any one of the nucleotide sequence of nucleotides 633-655, 643-665, 928-950, 1133-1155, 1140-1162, 1141-1163, 1143-1165, 1145-1167, 1148-1170, 1150-1172, 1151-1173, 1185-1207, 1306-1328, 1534-1556, 1540-1562, 1541-1563, 1976-1998, 1979-2001, 1980-2002, 2078-2100, 2386-2408, 2388-2410, 2389-2411, 2391-2413, 2393-2415, 2395-2417, 2396-2418, 2438-2460, and 2602-2624 of SEQ ID NO: 1, and the antisense strand comprises at least 15 contiguous nucleotides from the corresponding nucleotide sequence of SEQ ID NO:8, where a substitution of a T with a U in either SEQ ID NO: 1 or SEQ ID NO: 8 does not count as a difference; or
(d) wherein said dsRNA comprises a sense strand and an antisense strand forming a double stranded region, wherein the sense strand comprises at least 15 contiguous nucleotides differing by no more than three nucleotides from any one of the nucleotide sequence of nucleotides 153-175; 202-224; 219-241; 254-276; 304-326; 321-343; 347-369; 402-424; 418-440; 447-469; 491-513; 528-550; 549-571; 566-588; 591-613; 792-814; 819-841; 967-989; 1042-1064; 1234-1256; 1250-1272; 1269-1291; 1335-1357; 1354-1376; 1372-1394; 1422-1444; 1496-1518; 1670-1692; 1716-1738; 1757-1779; 1774-1796; 1793-1815; 1844-1866; 1871-1893; 1909-1931; 1924-1947; 1947-1969; 2161-2183; 2310-2332; 2330-2352; 2355-2377; 2494-2516; and 2527-2549 of SEQ ID NO; 1, and the antisense strand comprises at least 15 contiguous nucleotides from the corresponding nucleotide sequence of SEQ ID NO:8, where a substitution of a T with a U in either SEQ ID NO: 1 or SEQ ID NO: 8 does not count as a difference.

2-6. (canceled)

7. The dsRNA agent of claim 1, wherein at least one nucleotide of the dsRNA agent comprises a nucleotide modification.

8. (canceled)

9. The dsRNA agent of claim 1, wherein all of the nucleotides of the sense strand comprise a modification; all of the nucleotides of the antisense strand comprise a modification; or all of the nucleotides of the sense strand and all of the nucleotides of the antisense strand comprise a modification.

10. The dsRNA agent of claim 7, wherein at least one of the nucleotide modifications is selected from the group consisting of a deoxy-nucleotide modification, a 3′-terminal deoxythimidine (dT) nucleotide modification, a 2′-O-methyl nucleotide modification, a 2′-fluoro nucleotide modification, a 2′-deoxy-nucleotide modification, a locked nucleotide modification, an unlocked nucleotide modification, a conformationally restricted nucleotide modification, a constrained ethyl nucleotide modification, an abasic nucleotide modification, a 2′-amino-nucleotide modification, a 2′-O-allyl-nucleotide modification, 2′-C-alkyl-nucleotide modification, a 2′-methoxyethyl nucleotide modification, a 2′-O-alkyl-nucleotide modification, a morpholino nucleotide modification, a phosphoramidate modification, a non-natural base comprising nucleotide modification, a tetrahydropyran nucleotide modification, a 1,5-anhydrohexitol nucleotide modification, a cyclohexenyl nucleotide modification, a nucleotide comprising a phosphorothioate group modification, a nucleotide comprising a methylphosphonate group modification, a nucleotide comprising a 2′-phosphate modification, a nucleotide comprising a 5′-phosphate modification, a nucleotide comprising a 5′-phosphate mimic modification, a thermally destabilizing nucleotide modification, a glycol modified nucleotide (GNA) modification, and a 2-O—(N-methylacetamide) modified nucleotide modification; and combinations thereof.

11.-14. (canceled)

15. The dsRNA agent of claim 1, wherein the double stranded region is 19-30 nucleotide pairs in length.

16.-19. (canceled)

20. The dsRNA agent of claim 1, wherein
each strand is independently no more than 30 nucleotides in length.

21.-24. (canceled)

25. The dsRNA agent of claim 1, wherein at least one strand comprises a 3′ overhang of at least 1 nucleotide; or at least one strand comprises a 3′ overhang of at least 2 nucleotides.

26. (canceled)

27. The dsRNA agent of claim 1, further comprising a ligand.

28. The dsRNA agent of claim 27, wherein the ligand is conjugated to the 3′ end of the sense strand of the dsRNA agent.

29. The dsRNA agent of claim 27, wherein the ligand is an N-acetylgalactosamine (GalNAc) derivative.

30. The dsRNA agent of claim 27, wherein the ligand is one or more GalNAc derivatives attached through a monovalent, bivalent, or trivalent branched linker.

31. The dsRNA agent of claim 29, wherein the ligand is

[chemical structure]

32. The dsRNA agent of claim 31, wherein the dsRNA agent is conjugated to the ligand as shown in the following schematic [chemical structure]
and, wherein X is O or S.

33. The dsRNA agent of claim 32, wherein the X is O.

34. The dsRNA agent of claim 1, wherein the dsRNA agent further comprises at least one phosphorothioate or methylphosphonate internucleotide linkage.

35.-43. (canceled)

44. An isolated cell containing the dsRNA agent of claim 1.

45. A pharmaceutical composition for inhibiting expression of a gene encoding complement factor B (CFB) comprising the dsRNA agent of claim 1.

46.-50. (canceled)

51. An in vitro method of inhibiting expression of a complement factor B (CFB) gene in a cell, the method comprising contacting the cell with the dsRNA agent of claim 1, thereby inhibiting expression of the CFB gene in the cell.

52.-56. (canceled)

57. A method of treating a subject having a disorder that would benefit from reduction in complement factor B expression, comprising administering to the subject a therapeutically effective amount of the dsRNA agent of claim 1, thereby treating the subject having the disorder that would benefit from reduction in complement factor B expression.

58. (canceled)

59. The method of claim 57, wherein the disorder is a complement factor B-associated disorder.

60.-72. (canceled)
